(19) United States
(12) Patent Application Publication
(10) Pub. No.: US 2019/0218614 A1
(43) Pub. Date: Jul. 18, 2019

(54) CLONAL HEMATOPOIESIS AND CYTOKINE TARGETS

(71) Applicant: TRUSTEES OF BOSTON UNIVERSITY, Boston, MA (US)

(72) Inventors: Kenneth WALSH, Carlisle, MA (US); Soichi SANO, Charlottesville, VA (US); Kosei OSHIMA, Kagawa (JP)

(73) Assignee: TRUSTEES OF BOSTON UNIVERSITY, Boston, MA (US)

(21) Appl. No.: 16/249,104

(22) Filed: Jan. 16, 2019

Related U.S. Application Data
(60) Provisional application No. 62/617,875, filed on Jan. 16, 2018.

(51) Int. Cl. C12Q 1/6883

(52) U.S. Cl. CPC C12Q 1/6883; C12Q 2600/118; C12Q 2600/156

(57) ABSTRACT

As demonstrated herein, a preferential and progressive expansion of a subset of hematopoietic cells bearing somatic mutations in one or more HSC cardiometabolic driver genes leads to pro-inflammatory signaling at multiple levels. Accordingly, provided herein are compositions, methods, and assays for modulating a HSC cardiometabolic driver gene mutation-mediated proinflammatory activity.

### CROSS-REFERENCE TO RELATED APPLICATIONS

[0001] This application claims benefit under 35 U.S.C. § 119(e) of U.S. Provisional Application No. 62/617,875 filed Jan. 16, 2018, the content of which is incorporated herein by reference in its entirety.

### GOVERNMENT SUPPORT

[0002] This invention was made with Government Support under Contract Nos. HL131006 and HL138014 awarded by the National Institutes of Health (NIH). The Government has certain rights in the invention.

### SEQUENCE LISTING

[0003] The instant application contains a Sequence Listing which has been submitted electronically in ASCII format and is hereby incorporated by reference in its entirety. Said ASCII copy, created on Jan. 15, 2019, is named 701586-090850USPT_SL.txt and is 1,127,419 bytes in size.

### TECHNICAL FIELD

[0004] The technical field relates to compositions, methods, and assays for the treatment, prevention and diagnosis of cardio-metabolic diseases, chronic kidney disease, and other age-dependent chronic diseases that involve pathological inflammatory responses.

### BACKGROUND

[0005] Macrovascular diseases, such as cardiovascular disease (CVD) and stroke, steeply increase with age and account for >85% of chronic disease deaths in those >70 years of age (from Belsky et al. Proc. Natl. Acad. Sci. USA 2015). While cardiovascular disease is the leading cause of death in the elderly, almost 60% of elderly patients with atherosclerotic CVD have either no or just one conventional CV risk factors (e.g., hypertension, hypercholesterolemia, etc.). As can be seen in Khot et al. (JAMA 2003), more than 60% of patients with CVD display either zero or one conventional risk factors. Similarly, retrospective analysis of CVD patients revealed that up to 50% of these patients were classified as low-risk when applying predictive scales based on traditional risk factors (Akosah et al. JACC 2003). Consistent with these findings, the recent PESA and AWHS studies have reported that subclinical atherosclerosis can be detected in more than 57% of asymptomatic adults categorized as “low CV risk” on the basis of conventional 10-year risk prediction algorithms (Fernandez-Friera et al. Circulation 2015; Laclaustra et al. JACC 2016). However, much of this amounts to a desire—without identifying what the risk factors are. These clinical studies only demonstrate that there are as-yet-unidentified causal risk factors that drive cardiovascular disease in the human population.

### SUMMARY

[0006] The present invention is directed, in part, to a new paradigm of causal risk for cardiovascular and related diseases and provides novel compositions, methods, and assays for treating, preventing, and/or diagnosing the same. Epidemiological studies show that hematopoietic stem cells (HSCs) develop mutations that promote their clonal expansion at a relatively high frequency in the aging population. While very few of the HSCs acquire subsequent mutations in oncogenes that lead to blood cancers, the mechanistic findings of the studies described herein show that a single gene mutation that occurs frequently can predispose an individual to CVD and stroke that are common in the elderly (>50% of individuals). Accordingly, the findings described herein demonstrate that there is a common mechanistic basis between age-associated CVD and clonal expansion of HSCs having somatic mutations. These data provide experimental evidence supporting a mechanism whereby somatic mutations in HSCs represent a new causal risk factor for CVD, potentially adding to the predictive capabilities of the conventional risk factors (hyperlipidemia, hypertension, diabetes and smoking) that were deduced approximately 50 years ago. These data also provide the first mechanistic evidence for how somatic mutations in different genes in HSCs, such as TP53, JAK2, ASXL1, PPM1D/WIP1, TET2 and DNMT3A, can lead to chronic non-cancerous diseases, providing novel personalized therapies or preventive strategies for individuals carrying somatic mutations in blood cells. As shown herein, somatic mutations in HSCs leads, in part, to increases in inflammatory cytokines such as IL-1β, IL-6, and/or TNF-α. Accordingly, in some embodiments of the aspects described herein, neutralizing antibodies against IL-1β, IL-6, and/or TNF-α cytokines, or NLRP3 inflammasome inhibition can be particularly effective for the prevention/treatment of CVD and other metabolic diseases in individuals carrying somatic mutations in these genes.

[0007] Accordingly, provided herein, in some aspects, are methods for treating a subject having, or at risk for, a HSC (hematopoietic stem cell) cardiometabolic driver gene mutation-mediated proinflammatory disease comprising: administering a therapeutically effective amount of a pharmaceutical composition comprising an inhibitor of HSC cardiometabolic driver gene mutation-mediated proinflammatory activity and a pharmaceutically acceptable carrier to a subject having one or more somatic mutations in one or more HSC cardiometabolic driver gene in a sub-population of peripheral blood hematopoietic cells.

[0008] In some embodiments of these methods and all such methods described herein, the one or more somatic mutations in the one or more HSC cardiometabolic driver genes in the sub-population of peripheral blood hematopoietic cells cause clonal hematopoiesis in the subject.

[0009] In some embodiments of these methods and all such methods described herein, at least 2% of the peripheral blood hematopoietic cells have the one or more somatic mutations in the one or more HSC cardiometabolic driver genes.

[0010] In some embodiments of these methods and all such methods described herein, the one or more HSC cardiometabolic driver genes are selected from TP53, JAK2, DNMT3A, ASXL1, TET2 and PPM1D/WIP1.

[0011] In some embodiments of these methods and all such methods described herein, the one or more somatic mutations are in TP53 and are selected from a G743A mutation in SEQ ID NO:2 and a A659G mutation in SEQ ID NO: 2.

[0012] In some embodiments of these methods and all such methods described herein, the one or more somatic mutations are in JAK2 and is a G1849T in SEQ ID NO: 56.

[0013] In some embodiments of these methods and all such methods described herein, the one or more somatic mutations are in DNMT3A and are selected from a T1115C mutation in SEQ ID NO: 37; a C2711T mutation in SEQ ID NO: 37; a C1837G mutation in SEQ ID NO: 37; a A1666G mutation in SEQ ID NO: 37; a C1789T mutation in SEQ ID NO: 37; a G2719A mutation in SEQ ID NO: 37; a G1627T mutation in SEQ ID NO: 37; an A2723G mutation in SEQ ID NO: 37; a G1797T mutation in SEQ ID NO: 37; a T2252G mutation in SEQ ID NO: 37; a C1560A mutation in SEQ ID NO: 37; a T1031C mutation in SEQ ID NO: 37; a G2645A mutation in SEQ ID NO: 37; a C2043G mutation in SEQ ID NO: 37; a C2446T mutation in SEQ ID NO: 37; a A2198G mutation in SEQ ID NO: 37; A2281G mutation in SEQ ID NO: 37; a C920G mutation in SEQ ID NO: 37; a A2204G mutation in SEQ ID NO: 37; and a frameshift mutation in DNMT3A.

[0014] In some embodiments of these methods and all such methods described herein, the one or more somatic mutations are in ASXL1 and are selected from a C2407T mutation in SEQ ID NO: 61; a C2893T mutation in SEQ ID NO: 61; a 1926_1926delinsAG mutation in SEQ ID NO: 61; and a frameshift mutation in ASXL1.

[0015] In some embodiments of these methods and all such methods described herein, the one or more somatic mutations are in PPM1D and are selected from a G1618T mutation in SEQ ID NO: 64; a C1372T mutation in SEQ ID NO: 64; and a frameshift mutation in PPM1D.

[0016] In some embodiments of these methods and all such methods described herein, the subject further has one or more somatic mutations in TET2 in a sub-population of peripheral blood hematopoietic cells selected from an S282F mutation in SEQ ID NO: 68, an N312S mutation in SEQ ID NO: 68, an L346P mutation in SEQ ID NO: 68, an S460F mutation in SEQ ID NO: 68, a D666G mutation in SEQ ID NO: 68, a P941S mutation in SEQ ID NO: 68, and a C1135Y mutation in SEQ ID NO: 68.

[0017] In some embodiments of these methods and all such methods described herein, the inhibitor of HSC cardiometabolic driver gene mutation-mediated proinflammatory activity is an IL-1β inhibitor.

[0018] In some embodiments of these methods and all such methods described herein, the IL-1β inhibitor is an IL-1β inhibitor antibody or antigen-binding fragment thereof that binds to IL-1β and reduces IL-1β binding to its receptor(s).

[0019] In some embodiments of these methods and all such methods described herein, the IL-1β inhibitor antibody or antigen-binding fragment thereof is selected from ABT981, an anti-interleukin-1β inhibitor antibody by ABZYME, APX002, Canakinumab/Ilaris, CDP48, immunereszumab, LY2189102, MED18968, and XOMA052.

[0020] In some embodiments of these methods and all such methods described herein, the IL-1β inhibitor is an IL-1 receptor antagonist.

[0021] In some embodiments of these methods and all such methods described herein, the IL-1 receptor antagonist is selected from CDP484, CP412245, CYT013 IL1bQb, XL 130, AMG108, HL 2351, IL1Hyl, AXXO, orthokine, PRT 1000, anakinra, and rilonacept.

[0022] In some embodiments of these methods and all such methods described herein, the IL-1β inhibitor is a small molecule or microRNA inhibitor that inhibits IL-1-mediated pro-inflammatory activity.

[0023] In some embodiments of these methods and all such methods described herein, the small molecule or microRNA inhibitor is selected from AC201, CP412245, MCC950 or CRID3, inflabion, inflammasome modulator OPSONA, PGE3935199, PGE527667, TRK530, β-hydroxybutyrate (BHB), and microRNA-223. In some embodiments of these methods and all such methods described herein, the small molecule inhibitor is MCC950.

[0024] In some embodiments of these methods and all such methods described herein, the inhibitor of HSC cardiometabolic driver gene mutation-mediated proinflammatory activity is an IL-6 inhibitor.

[0025] In some embodiments of these methods and all such methods described herein, the IL-6 inhibitor is an IL-6 inhibitor antibody or antigen-binding fragment thereof that binds to IL-6 and reduces IL-6 binding to its receptor(s).

[0026] In some embodiments of these methods and all such methods described herein, the IL-6 inhibitor antibody or antigen-binding fragment thereof is selected from Siltuximab, Olokizumab, Elsilimomab, mAb 1339, Sirukumab, Clazakizumab, ARGX-109, FM101, and C326.

[0027] In some embodiments of these methods and all such methods described herein, the IL-6 inhibitor is an IL-6 receptor antagonist.

[0028] In some embodiments of these methods and all such methods described herein, the IL-6 receptor antagonist is selected from tocilizumab, sarilumab, REGN88, FE301, and LMT-28.

[0029] In some embodiments of these methods and all such methods described herein, the IL-6 inhibitor is a small molecule or microRNA inhibitor.

[0030] In some embodiments of these methods and all such methods described herein, the small molecule IL-6 inhibitor is ALX-0061 or LMT-28.

[0031] In some embodiments of these methods and all such methods described herein, the IL-6 inhibitor is a JAK-STAT inhibitor.

[0032] In some embodiments of these methods and all such methods described herein, the JAK-STAT inhibitor is selected from baricitinib, decernotinid, filgotinib, INCB-039110, ruxolitinib, tofacitinib, Oclacitinib, Gandotinib, Lestaurtinib, Momelotinib, Pacritinib, PF-04965842, Upadacitinib, and Peficitinib.

[0033] In some embodiments of these methods and all such methods described herein, the inhibitor of HSC cardiometabolic driver gene mutation-mediated proinflammatory activity is a TNFα inhibitor.

[0034] In some embodiments of these methods and all such methods described herein, the TNFα inhibitor is a TNFα inhibitor antibody or antigen-binding fragment thereof that binds to TNFα and reduces TNFα binding to its receptor(s).

[0035] In some embodiments of these methods and all such methods described herein, the TNFα inhibitor antibody or antigen-binding fragment thereof is selected from adalimumab, Adalimumab-atto, certolizumab pegol, golimumab, infliximab,

[0036] In some embodiments of these methods and all such methods described herein, the TNFα inhibitor is a TNFα receptor antagonist.

[0037] In some embodiments of these methods and all such methods described herein, the TNFα receptor antagonist is etanercept.

[0038] In some embodiments of these methods and all such methods described herein, the TNFα inhibitor is a small molecule or microRNA inhibitor.

[0039] In some embodiments of these methods and all such methods described herein, the method further comprises monitoring hematopoietic cell clonality, IL-1β proinflammatory activity, IL-6 proinflammatory activity, TNFα proinflammatory activity or any combination thereof following the administration of the inhibitor of HSC cardiometabolic driver gene mutation-mediated proinflammatory activity.

[0040] In some embodiments of these methods and all such methods described herein, the method further comprises decreasing the number or percentage of hematopoietic cells comprising the one or more somatic mutations in the one or more HSC cardiometabolic driver genes in the subject by performing therapeutic cytapheresis on the subject.

[0041] In some embodiments of these methods and all such methods described herein, the method further comprises administering one or more additional therapeutic agents to the subject.

[0042] Also provided herein, in some aspects, are methods for treating a subject having, or at risk for, a HSC cardiometabolic driver gene mutation-mediated proinflammatory disease comprising:
[0043] (a) sequencing a hematopoietic cell sample from a subject to identify one or more somatic mutations in one or more HSC cardiometabolic driver genes in the hematopoietic cell sample; and
[0044] (b) administering a therapeutically effective amount of a pharmaceutical composition comprising an inhibitor of HSC cardiometabolic driver gene mutation-mediated proinflammatory activity and a pharmaceutically acceptable carrier if one or more somatic mutations in one or more HSC cardiometabolic driver genes are identified in the hematopoietic cell sample.

[0045] In some embodiments of these methods and all such methods described herein, the hematopoietic cell sample is a peripheral blood hematopoietic cell sample.

[0046] In some embodiments of these methods and all such methods described herein, the hematopoietic cell sample is enriched for myeloid-derived cells.

[0047] In some embodiments of these methods and all such methods described herein, the one or more somatic mutations in the one or more HSC cardiometabolic driver genes identified in the hematopoietic cell sample cause clonal hematopoiesis in the subject.

[0048] In some embodiments of these methods and all such methods described herein, at least 2% of the hematopoietic cells are identified as having one or more HSC cardiometabolic driver gene mutations.

[0049] In some embodiments of these methods and all such methods described herein, the one or more HSC cardiometabolic driver genes are selected from TP53, JAK2, DNMT3A, ASXL1, and PPM 1D/WIP1.

[0050] In some embodiments of these methods and all such methods described herein, the one or more somatic mutations are in TP53 and are selected from a G743A mutation in SEQ ID NO:2 and a A659G mutation in SEQ ID NO: 2.

[0051] In some embodiments of these methods and all such methods described herein, the one or more somatic mutations are in JAK2 and is a G1849T in SEQ ID NO: 56.

[0052] In some embodiments of these methods and all such methods described herein, the one or more somatic mutations are in DNMT3A and are selected from a T1115C mutation in SEQ ID NO: 37; a C2711T mutation in SEQ ID NO: 37; a C1837G mutation in SEQ ID NO: 37; a A1666G mutation in SEQ ID NO: 37; a C1789T mutation in SEQ ID NO: 37; a G2719A mutation in SEQ ID NO: 37; a G1627T mutation in SEQ ID NO: 37; an A2723G mutation in SEQ ID NO: 37; a G1797T mutation in SEQ ID NO: 37; a T2252G mutation in SEQ ID NO: 37; a C1560A mutation in SEQ ID NO: 37; a T1031C mutation in SEQ ID NO: 37; a G2645A mutation in SEQ ID NO: 37; a C2043G mutation in SEQ ID NO: 37; a C2446T mutation in SEQ ID NO: 37; a A2198G mutation in SEQ ID NO: 37; A2281G mutation in SEQ ID NO: 37; a C920G mutation in SEQ ID NO: 37; a A2204G mutation in SEQ ID NO: 37; and a frameshift mutation in DNMT3A.

[0053] In some embodiments of these methods and all such methods described herein, the one or more somatic mutations are in ASXL1 and are selected from a C2407T mutation in SEQ ID NO: 61; a C2893T mutation in SEQ ID NO: 61; a 1926_1926delinsAG mutation in SEQ ID NO: 61; and a frameshift mutation in ASXL1.

[0054] In some embodiments of these methods and all such methods described herein, the one or more somatic mutations are in PPM1D and are selected from a G1618T mutation in SEQ ID NO: 64; a C1372T mutation in SEQ ID NO: 64; and a frameshift mutation in PPM1D.

[0055] In some embodiments of these methods and all such methods described herein, the subject further has one or more somatic mutations in TET2 in a sub-population of peripheral blood hematopoietic cells selected from an S282F mutation in SEQ ID NO: 68, an N312S mutation in SEQ ID NO: 68, an L346P mutation in SEQ ID NO: 68, an S460F mutation in SEQ ID NO: 68, a D666G mutation in SEQ ID NO: 68, a P941S mutation in SEQ ID NO: 68, and a C1135Y mutation in SEQ ID NO: 68.

[0056] In some embodiments of these methods and all such methods described herein, the inhibitor of HSC cardiometabolic driver gene mutation-mediated proinflammatory activity is an IL-1β inhibitor.

[0057] In some embodiments of these methods and all such methods described herein, the IL-1β inhibitor is an IL-1β inhibitor antibody or antigen-binding fragment thereof that binds to IL-1β and reduces IL-1β binding to its receptor(s).

[0058] In some embodiments of these methods and all such methods described herein, the IL-1β inhibitor antibody or antigen-binding fragment thereof is selected from ABT981, an anti-interleukin-1β inhibitor antibody by ABZYME, APX002, Canakinumab/Ilaris, CDP48, immunereszumab, LY2189102, MEDI8968, and XOMA052.

[0059] In some embodiments of these methods and all such methods described herein, the IL-1β inhibitor is an IL-1 receptor antagonist.

[0060] In some embodiments of these methods and all such methods described herein, the IL-1 receptor antagonist is selected from CDP484, CP412245, CYT013 IL1bQb, XL 130, AMG108, HL 2351, IL1Hyl, AXXO, orthokine, PRT 1000, anakinra, and rilonacept.

[0061] In some embodiments of these methods and all such methods described herein, the IL-1β inhibitor is a small molecule or microRNA inhibitor that inhibits IL-1β-mediated pro-inflammatory activity.

[0062] In some embodiments of these methods and all such methods described herein, the small molecule or microRNA inhibitor is selected from AC201, CP412245, MCC950 or CRID3, inflabion, inflammasome modulator OPSONA, PGE3935199, PGE527667, TRK530, j-hydroxybutyrate (BHB), and microRNA-223. In some embodiments of these methods and all such methods described herein, the small molecule inhibitor is MCC950.

[0063] In some embodiments of these methods and all such methods described herein, the inhibitor of HSC cardiometabolic driver gene mutation-mediated proinflammatory activity is an IL-6 inhibitor.

[0064] In some embodiments of these methods and all such methods described herein, the IL-6 inhibitor is an IL-6 inhibitor antibody or antigen-binding fragment thereof that binds to IL-6 and reduces IL-6 binding to its receptor(s).

[0065] In some embodiments of these methods and all such methods described herein, the IL-6 inhibitor antibody or antigen-binding fragment thereof is selected from Siltuximab, Olokizumab, Elsilimomab, mAb 1339, Sirukumab, Clazakizumab, ARGX-109, FM101, and C326.

[0066] In some embodiments of these methods and all such methods described herein, the IL-6 inhibitor is an IL-6 receptor antagonist.

[0067] In some embodiments of these methods and all such methods described herein, the IL-6 receptor antagonist is selected from tocilizumab, sarilumab, REGN88, FE301, and LMT-28.

[0068] In some embodiments of these methods and all such methods described herein, the IL-6 inhibitor is a small molecule or microRNA inhibitor.

[0069] In some embodiments of these methods and all such methods described herein, the small molecule IL-6 inhibitor is ALX-0061 or LMT-28.

[0070] In some embodiments of these methods and all such methods described herein, the IL-6 inhibitor is a JAK-STAT inhibitor.

[0071] In some embodiments of these methods and all such methods described herein, the JAK-STAT inhibitor is selected from baricitinib, decernotinid, filgotinib, INCB-039110, ruxolitinib, tofacitinib, Oclacitinib, Gandotinib, Lestaurtinib, Momelotinib, Pacritinib, PF-04965842, Upadacitinib, and Peficitinib.

[0072] In some embodiments of these methods and all such methods described herein, the inhibitor of HSC cardiometabolic driver gene mutation-mediated proinflammatory activity is a TNFα inhibitor.

[0073] In some embodiments of these methods and all such methods described herein, the TNFα inhibitor is a TNFα inhibitor antibody or antigen-binding fragment thereof that binds to TNFα and reduces TNFα binding to its receptor(s).

[0074] In some embodiments of these methods and all such methods described herein, the TNFα inhibitor antibody or antigen-binding fragment thereof is selected from adalimumab, Adalimumab-atto, certolizumab pegol, golimumab, infliximab,

[0075] In some embodiments of these methods and all such methods described herein, the TNFα inhibitor is a TNFα receptor antagonist.

[0076] In some embodiments of these methods and all such methods described herein, the TNFα receptor antagonist is etanercept.

[0077] In some embodiments of these methods and all such methods described herein, the TNFα inhibitor is a small molecule or microRNA inhibitor.

[0078] In some embodiments of these methods and all such methods described herein, the method further comprises monitoring hematopoietic cell clonality, IL-1β proinflammatory activity, IL-6 proinflammatory activity, TNFα proinflammatory activity or any combination thereof following the administration of the inhibitor of HSC cardiometabolic driver gene mutation-mediated proinflammatory activity.

[0079] In some embodiments of these methods and all such methods described herein, the method further comprises decreasing the number or percentage of hematopoietic cells comprising the one or more somatic mutations in the one or more HSC cardiometabolic driver genes in the subject by performing therapeutic cytapheresis on the subject.

[0080] In some embodiments of these methods and all such methods described herein, the method further comprises administering one or more additional therapeutic agents to the subject.

[0081] In some embodiments of these methods and all such methods described herein, the HSC cardiometabolic driver gene mutation-mediated proinflammatory disease is a cardiometabolic disease or disorder.

[0082] In some embodiments of these methods and all such methods described herein, the HSC cardiometabolic driver gene mutation-mediated proinflammatory disease is a chronic kidney disease or disorder.

[0083] Also provided here, in some aspects, are pharmaceutical compositions comprising an inhibitor of HSC cardiometabolic driver gene mutation-mediated proinflammatory activity and a pharmaceutically acceptable carrier for use in a subject having one or more somatic mutations in one or more HSC cardiometabolic driver genes in a sub-population of hematopoietic cells.

[0084] In some embodiments of these compositions and all such compositions described herein, the one or more somatic mutations in the one or more HSC cardiometabolic driver genes in the sub-population of hematopoietic cells cause clonal hematopoiesis in the subject.

[0085] In some embodiments of these compositions and all such compositions described herein, at least 2% of the hematopoietic cells in the subject have the one or more mutations in one or more HSC cardiometabolic driver genes.

[0086] In some embodiments of these compositions and all such compositions described herein, the one or more HSC cardiometabolic driver genes are selected from TP53, JAK2, DNMT3A, ASXL1, and PPM1D/WIP1.

[0087] In some embodiments of these compositions and all such compositions described herein, the one or more somatic mutations are in TP53 and are selected from a G743A mutation in SEQ ID NO:2 and a A659G mutation in SEQ ID NO: 2.

[0088] In some embodiments of these compositions and all such compositions described herein, the one or more somatic mutations are in JAK2 and is a G1849T in SEQ ID NO: 56.

[0089] In some embodiments of these compositions and all such compositions described herein, the one or more somatic mutations are in DNMT3A and are selected from a T1115C mutation in SEQ ID NO: 37; a C2711T mutation in SEQ ID NO: 37; a C1837G mutation in SEQ ID NO: 37; a A1666G mutation in SEQ ID NO: 37; a C1789T mutation in SEQ ID NO: 37; a G2719A mutation in SEQ ID NO: 37; a G1627T mutation in SEQ ID NO: 37; an A2723G mutation in SEQ ID NO: 37; a G1797T mutation in SEQ ID NO: 37; a T2252G mutation in SEQ ID NO: 37; a C1560A mutation in SEQ ID NO: 37; a T1031C mutation in SEQ ID NO: 37; a G2645A mutation in SEQ ID NO: 37; a C2043G mutation in SEQ ID NO: 37; a C2446T mutation in SEQ ID NO: 37; a A2198G mutation in SEQ ID NO: 37; A2281G mutation in SEQ ID NO: 37; a C920G mutation in SEQ ID NO: 37; a A2204G mutation in SEQ ID NO: 37; and a frameshift mutation in DNMT3A.

[0090] In some embodiments of these compositions and all such compositions described herein, the one or more somatic mutations are in ASXL1 and are selected from a C2407T mutation in SEQ ID NO: 61; a C2893T mutation in SEQ ID NO: 61; a 1926_1926delinsAG mutation in SEQ ID NO: 61; and a frameshift mutation in ASXL1.

[0091] In some embodiments of these compositions and all such compositions described herein, the one or more somatic mutations are in PPM1D and are selected from a G1618T mutation in SEQ ID NO: 64; a C1372T mutation in SEQ ID NO: 64; and a frameshift mutation in PPM1D.

[0092] In some embodiments of these compositions and all such compositions described herein, the subject further has one or more somatic mutations in TET2 in a sub-population of peripheral blood hematopoietic cells selected from an S282F mutation in SEQ ID NO: 68, an N312S mutation in SEQ ID NO: 68, an L346P mutation in SEQ ID NO: 68, an S460F mutation in SEQ ID NO: 68, a D666G mutation in SEQ ID NO: 68, a P941S mutation in SEQ ID NO: 68, and a C1135Y mutation in SEQ ID NO: 68.

[0093] In some embodiments of these compositions and all such compositions described herein, the inhibitor of HSC cardiometabolic driver gene mutation-mediated proinflammatory activity is an IL-1β inhibitor.

[0094] In some embodiments of these compositions and all such compositions described herein, the IL-1β inhibitor is an IL-1β inhibitor antibody or antigen-binding fragment thereof that binds to IL-1β and reduces IL-1β binding to its receptor(s).

[0095] In some embodiments of these compositions and all such compositions described herein, the IL-1β inhibitor antibody or antigen-binding fragment thereof is selected from ABT981, an anti-interleukin-1β inhibitor antibody by ABZYME, APX002, Canakinumab/Ilaris, CDP48, immunereszumab, LY2189102, MED18968, and XOMA052.

[0096] In some embodiments of these compositions and all such compositions described herein, the IL-1β inhibitor is an IL-1 receptor antagonist.

[0097] In some embodiments of these compositions and all such compositions described herein, the IL-1 receptor antagonist is selected from CDP484, CP412245, CYT013 IL1bQb, XL 130, AMG108, HL 2351, IL1Hyl, AXXO, orthokine, PRT 1000, anakinra, and rilonacept.

[0098] In some embodiments of these compositions and all such compositions described herein, the IL-1β inhibitor is a small molecule or microRNA inhibitor that inhibits IL-1β-mediated pro-inflammatory activity.

[0099] In some embodiments of these compositions and all such compositions described herein, the small molecule or microRNA inhibitor is selected from AC201, CP412245, MCC950 or CRID3, inflabion, inflammasome modulator OPSONA, PGE3935199, PGE527667, TRK530, β-hydroxybutyrate (BHB), and microRNA-223. In some embodiments of these compositions and all such compositions described herein, the small molecule inhibitor is MCC950.

[0100] In some embodiments of these compositions and all such compositions described herein, the inhibitor of HSC cardiometabolic driver gene mutation-mediated proinflammatory activity is an IL-6 inhibitor.

[0101] In some embodiments of these compositions and all such compositions described herein, the IL-6 inhibitor is an IL-6 inhibitor antibody or antigen-binding fragment thereof that binds to IL-6 and reduces IL-6 binding to its receptor(s).

[0102] In some embodiments of these compositions and all such compositions described herein, the IL-6 inhibitor antibody or antigen-binding fragment thereof is selected from Siltuximab, Olokizumab, Elsilimomab, mAb 1339, Sirukumab, Clazakizumab, ARGX-109, FM101, and C326.

[0103] In some embodiments of these compositions and all such compositions described herein, the IL-6 inhibitor is an IL-6 receptor antagonist.

[0104] In some embodiments of these compositions and all such compositions described herein, the IL-6 receptor antagonist is selected from tocilizumab, sarilumab, REGN88, FE301, and LMT-28.

[0105] In some embodiments of these compositions and all such compositions described herein, the IL-6 inhibitor is a small molecule or microRNA inhibitor.

[0106] In some embodiments of these compositions and all such compositions described herein, the small molecule IL-6 inhibitor is ALX-0061 or LMT-28.

[0107] In some embodiments of these compositions and all such compositions described herein, the IL-6 inhibitor is a JAK-STAT inhibitor.

[0108] In some embodiments of these compositions and all such compositions described herein, the JAK-STAT inhibitor is selected from baricitinib, decernotinid, filgotinib, INCB-039110, ruxolitinib, tofacitinib, Oclacitinib, Gandotinib, Lestaurtinib, Momelotinib, Pacritinib, PF-04965842, Upadacitinib, and Peficitinib.

[0109] In some embodiments of these compositions and all such compositions described herein, the inhibitor of HSC cardiometabolic driver gene mutation-mediated proinflammatory activity is a TNFα inhibitor.

[0110] In some embodiments of these compositions and all such compositions described herein, the TNFα inhibitor is a TNFα inhibitor antibody or antigen-binding fragment thereof that binds to TNFα and reduces TNFα binding to its receptor(s).

[0111] In some embodiments of these compositions and all such compositions described herein, the TNFα inhibitor antibody or antigen-binding fragment thereof is selected from adalimumab, Adalimumab-atto, certolizumab pegol, golimumab, infliximab,

[0112] In some embodiments of these compositions and all such compositions described herein, the TNFα inhibitor is a TNFα receptor antagonist.

[0113] In some embodiments of these compositions and all such compositions described herein, the TNFα receptor antagonist is etanercept.

[0114] In some embodiments of these compositions and all such compositions described herein, the TNFα inhibitor is a small molecule or microRNA inhibitor.

[0115] In some embodiments of these compositions and all such compositions described herein, the HSC cardiometabolic driver gene mutation-mediated proinflammatory disease is a cardiometabolic disease or disorder, e.g., CVD, myocardial infarction, heart failure, cardiac remodeling, or the like.

[0116] In some embodiments of these compositions and all such compositions described herein, the HSC cardiometabolic driver gene mutation-mediated proinflammatory disease is a chronic kidney disease or disorder.

[0117] Provided herein, in some aspects, are methods for detecting a subject having, or at risk for, a cardiometabolic driver gene mutation-mediated proinflammatory disease comprising: (i) obtaining a hematopoietic cell sample from a subject, and (ii) sequencing the hematopoietic cell sample from the subject to detect one or more somatic mutations in one or more HSC cardiometabolic driver genes in the hematopoietic cell sample.

[0118] In some embodiments of these methods and all such methods described herein, the hematopoietic cell sample is a peripheral blood hematopoietic cell sample.

[0119] In some embodiments of these methods and all such methods described herein, the hematopoietic cell sample is enriched for myeloid-derived cells.

[0120] In some embodiments of these methods and all such methods described herein, the one or more somatic mutations in the one or more HSC cardiometabolic driver genes identified in the hematopoietic cell sample cause clonal hematopoiesis in the subject.

[0121] In some embodiments of these methods and all such methods described herein, at least 2% of the hematopoietic cells are identified as having one or more HSC cardiometabolic driver gene mutations. In some embodiments of these methods and all such methods described herein, the one or more HSC cardiometabolic driver genes are selected from TP53, JAK2, DNMT3A, ASXL1, and PPM1D/WIP1.

[0122] In some embodiments of these methods and all such methods described herein, the one or more somatic mutations are in TP53 and are selected from a G743A mutation in SEQ ID NO:2 and a A659G mutation in SEQ ID NO: 2.

[0123] In some embodiments of these methods and all such methods described herein, the one or more somatic mutations are in JAK2 and is a G1849T in SEQ ID NO: 56.

[0124] In some embodiments of these methods and all such methods described herein, the one or more somatic mutations are in DNMT3A and are selected from a T1115C mutation in SEQ ID NO: 37; a C2711T mutation in SEQ ID NO: 37; a C1837G mutation in SEQ ID NO: 37; a A1666G mutation in SEQ ID NO: 37; a C1789T mutation in SEQ ID NO: 37; a G2719A mutation in SEQ ID NO: 37; a G1627T mutation in SEQ ID NO: 37; an A2723G mutation in SEQ ID NO: 37; a G1797T mutation in SEQ ID NO: 37; a T2252G mutation in SEQ ID NO: 37; a C1560A mutation in SEQ ID NO: 37; a T1031C mutation in SEQ ID NO: 37; a G2645A mutation in SEQ ID NO: 37; a C2043G mutation in SEQ ID NO: 37; a C2446T mutation in SEQ ID NO: 37; a A2198G mutation in SEQ ID NO: 37; A2281G mutation in SEQ ID NO: 37; a C920G mutation in SEQ ID NO: 37; a A2204G mutation in SEQ ID NO: 37; and a frameshift mutation in DNMT3A.

[0125] In some embodiments of these methods and all such methods described herein, the one or more somatic mutations are in ASXL1 and are selected from a C2407T mutation in SEQ ID NO: 61; a C2893T mutation in SEQ ID NO: 61; a 1926_1926delinsAG mutation in SEQ ID NO: 61; and a frameshift mutation in ASXL1.

[0126] In some embodiments of these methods and all such methods described herein, the one or more somatic mutations are in PPM1D and are selected from a G1618T mutation in SEQ ID NO: 64; a C1372T mutation in SEQ ID NO: 64; and a frameshift mutation in PPM1D.

[0127] In some embodiments of these methods and all such methods described herein, the subject further has one or more somatic mutations in TET2 in a sub-population of peripheral blood hematopoietic cells selected from an S282F mutation in SEQ ID NO: 68, an N312S mutation in SEQ ID NO: 68, an L346P mutation in SEQ ID NO: 68, an S460F mutation in SEQ ID NO: 68, a D666G mutation in SEQ ID NO: 68, a P941S mutation in SEQ ID NO: 68, and a C1135Y mutation in SEQ ID NO: 68.

[0128] In some embodiments of these methods and all such methods described herein, the method further comprises administering a therapeutically effective amount of a pharmaceutical method comprising an inhibitor of HSC cardiometabolic driver gene mutation-mediated proinflammatory activity and a pharmaceutically acceptable carrier if one or more somatic mutations in one or more HSC cardiometabolic driver genes are identified in the hematopoietic cell sample.

[0129] In some embodiments of these methods and all such methods described herein, the inhibitor of HSC cardiometabolic driver gene mutation-mediated proinflammatory activity is an IL-1β inhibitor.

[0130] In some embodiments of these methods and all such methods described herein, the IL-1β inhibitor is an IL-1β inhibitor antibody or antigen-binding fragment thereof that binds to IL-1β and reduces IL-1β binding to its receptor(s).

[0131] In some embodiments of these methods and all such methods described herein, the IL-1β inhibitor antibody or antigen-binding fragment thereof is selected from ABT981, an anti-interleukin-1β inhibitor antibody by ABZYME, APX002, Canakinumab/Ilaris, CDP48, immunereszumab, LY2189102, MEDI8968, and XOMA052.

[0132] In some embodiments of these methods and all such methods described herein, the IL-1β inhibitor is an IL-1 receptor antagonist.

[0133] In some embodiments of these methods and all such methods described herein, the IL-1 receptor antagonist is selected from CDP484, CP412245, CYT013 IL1bQb, XL 130, AMG108, HL 2351, IL1Hyl, AXXO, orthokine, PRT 1000, anakinra, and rilonacept.

[0134] In some embodiments of these methods and all such methods described herein, the IL-1β inhibitor is a small molecule or microRNA inhibitor that inhibits IL-1β-mediated pro-inflammatory activity.

[0135] In some embodiments of these methods and all such methods described herein, the small molecule or microRNA inhibitor is selected from AC201, CP412245, MCC950 or CRID3, inflabion, inflammasome modulator OPSONA, PGE3935199, PGE527667, TRK530, β-hydroxybutyrate (BHB), and microRNA-223.

[0136] In some embodiments of these methods and all such methods described herein, the small molecule inhibitor is MCC950.

[0137] In some embodiments of these methods and all such methods described herein, the inhibitor of HSC cardiometabolic driver gene mutation-mediated proinflammatory activity is an IL-6 inhibitor.

[0138] In some embodiments of these methods and all such methods described herein, the IL-6 inhibitor is an IL-6 inhibitor antibody or antigen-binding fragment thereof that binds to IL-6 and reduces IL-6 binding to its receptor(s).

[0139] In some embodiments of these methods and all such methods described herein, the IL-6 inhibitor antibody or antigen-binding fragment thereof is selected from Siltuximab, Olokizumab, Elsilimomab, mAb 1339, Sirukumab, Clazakizumab, ARGX-109, FM101, and C326.

[0140] In some embodiments of these methods and all such methods described herein, the IL-6 inhibitor is an IL-6 receptor antagonist.

[0141] In some embodiments of these methods and all such methods described herein, the IL-6 receptor antagonist is selected from tocilizumab, sarilumab, REGN88, FE301, and LMT-28.

[0142] In some embodiments of these methods and all such methods described herein, the IL-6 inhibitor is a small molecule or microRNA inhibitor.

[0143] In some embodiments of these methods and all such methods described herein, the small molecule IL-6 inhibitor is ALX-0061 or LMT-28.

[0144] In some embodiments of these methods and all such methods described herein, the IL-6 inhibitor is a JAK-STAT inhibitor.

[0145] In some embodiments of these methods and all such methods described herein, the JAK-STAT inhibitor is selected from baricitinib, decernotinid, filgotinib, INCB-039110, ruxolitinib, tofacitinib, Oclacitinib, Gandotinib, Lestaurtinib, Momelotinib, Pacritinib, PF-04965842, Upadacitinib, and Peficitinib.

[0146] In some embodiments of these methods and all such methods described herein, the inhibitor of HSC cardiometabolic driver gene mutation-mediated proinflammatory activity is a TNFα inhibitor.

[0147] In some embodiments of these methods and all such methods described herein, the TNFα inhibitor is a TNFα inhibitor antibody or antigen-binding fragment thereof that binds to TNFα and reduces TNFα binding to its receptor(s).

[0148] In some embodiments of these methods and all such methods described herein, the TNFα inhibitor antibody or antigen-binding fragment thereof is selected from adalimumab, Adalimumab-atto, certolizumab pegol, golimumab, infliximab,

[0149] In some embodiments of these methods and all such methods described herein, the TNFα inhibitor is a TNFα receptor antagonist.

[0150] In some embodiments of these methods and all such methods described herein, the TNFα receptor antagonist is etanercept.

[0151] In some embodiments of these methods and all such methods described herein, the TNFα inhibitor is a small molecule or microRNA inhibitor.

[0152] In some embodiments of these methods and all such methods described herein, the method further comprises monitoring hematopoietic cell clonality, IL-1β proinflammatory activity, IL-6 proinflammatory activity, TNFα proinflammatory activity or any combination thereof following the administration of the inhibitor of HSC cardiometabolic driver gene mutation-mediated proinflammatory activity.

[0153] In some embodiments of these methods and all such methods described herein, the method further comprises decreasing the number or percentage of hematopoietic cells comprising the one or more somatic mutations in the one or more HSC cardiometabolic driver genes in the subject by performing therapeutic cytapheresis on the subject.

[0154] In some embodiments of these methods and all such methods described herein, the method further comprises administering one or more additional therapeutic agents to the subject.

[0155] In some embodiments of these methods and all such methods described herein, the HSC cardiometabolic driver gene mutation-mediated proinflammatory disease is a cardiometabolic disease or disorder.

[0156] In some embodiments of these methods and all such methods described herein, the HSC cardiometabolic driver gene mutation-mediated proinflammatory disease is a chronic kidney disease or disorder.

### Definitions

[0157] Unless otherwise defined herein, scientific and technical terms used in connection with the present application shall have the meanings that are commonly understood by those of ordinary skill in the art to which this disclosure belongs. It should be understood that this invention is not limited to the particular methodology, protocols, and reagents, etc., described herein and as such can vary. The terminology used herein is for the purpose of describing particular embodiments only, and is not intended to limit the scope of the present invention, which is defined solely by the claims. Definitions of common terms in immunology and molecular biology can be found in The Merck Manual of Diagnosis and Therapy, 20th Edition, published by Merck Sharp & Dohme Corp., 2018 (ISBN 0911910190, 978-0911910421); Robert S. Porter et al. (eds.), The Encyclopedia of Molecular Cell Biology and Molecular Medicine, published by Blackwell Science Ltd., 1999-2012 (ISBN 9783527600908); and Robert A. Meyers (ed.), Molecular Biology and Biotechnology: a Comprehensive Desk Reference, published by VCH Publishers, Inc., 1995 (ISBN 1-56081-569-8); Immunology by werner Luttmann, published by Elsevier, 2006; Janeway's Immunobiology, Kenneth Murphy, Allan Mowat, Casey weaver (eds.), W. W. Norton & Company, 2016 (ISBN 0815345054, 978-0815345053); Lewin's Genes XI, published by Jones & Bartlett Publishers, 2014 (ISBN-1449659055); Michael Richard Green and Joseph Sambrook, Molecular Cloning: A Laboratory Manual, 4th ed., Cold Spring Harbor Laboratory Press, Cold Spring Harbor, N.Y., USA (2012) (ISBN 1936113414); Davis et al., Basic Methods in Molecular Biology, Elsevier Science Publishing, Inc., New York, USA (2012) (ISBN 044460149X); Laboratory Methods in Enzymology: DNA, Jon Lorsch (ed.) Elsevier, 2013 (ISBN 0124199542); Current Protocols in Molecular Biology (CPMB), Frederick M. Ausubel (ed.), John Wiley and Sons, 2014 (ISBN 047150338X, 9780471503385), Current Protocols in Protein Science (CPPS), John E. Coligan (ed.), John Wiley and Sons, Inc., 2005; and Current Protocols in Immunology (CPI) (John E. Coligan, ADA M Kruisbeek, David H Margulies, Ethan M Shevach, Warren Strobe, (eds.) John Wiley and Sons, Inc., 2003 (ISBN 0471142735, 9780471142737), the contents of which are all incorporated by reference herein in their entireties.

[0158] As used herein, an “inhibitor of an HSC cardiometabolic driver gene mutation-mediated proinflammatory activity” refers to any agent or molecule that significantly blocks, inhibits, reduces, or interferes with the downstream effects of one or more somatic mutations in an HSC cardiometabolic driver gene, such as TP53, JAK2, DNMT3A, ASXL1, and/or PPM1D/WIP1, that leads to increased pro-inflammatory IL-1β signaling, increased pro-inflammatory IL-6 signaling, and/or increased pro-inflammatory TNFα signaling. Such increased pro-inflammatory IL-1β signaling, increased pro-inflammatory IL-6 signaling, and/or increased pro-inflammatory TNFα signaling includes, but is not limited to, increased IL-13, IL-6, and/or TNFα transcription, increased NLRP3 inflammasome-mediated IL-1β secretion, increased IL-1-Receptor 1-mediated IL-1β signaling, increased IL-6-Receptor α-mediated IL-6 signaling, increased gp130-mediated IL-6 signaling, increased JAK1/JAK2-mediated IL-6 signaling, increased STAT3/STAT1-mediated IL-6 signaling, increased TNFR1-mediated TNFα signaling, increased TNFR2-mediated TNFα signaling, and/or increased TRAF2/TRAF3-mediated TNFα signaling.

[0159] As used herein, the terms reduce(s)/reduced/reducing/reduction, inhibit(s)/inhibiting/inhibited or decrease(s)/decreasing/decreased generally means either a reduction or inhibition of at least 5%, at least 10%, at least 25%, at least 50%, at least 60%, at least 70%, at least 80%, at least 90%, at least 95%, at least 98%, or more, compared to the level of: IL-1β, IL-6, and/or TNFα transcription, IL-1β, IL-6, and/or TNFα translation, NLRP3 inflammasome-mediated IL-1β secretion, IL-1β binding to IL-1 receptor, IL-6 binding to IL-6-Receptor, IL-6 binding to gp130, and/or TNFα binding to TNFR 1 and/or TNFR2 under the same conditions but without the presence of inhibitors of HSC cardiometabolic driver gene-mediated proinflammatory activity described herein.

[0160] A disease or medical condition is considered to be mediated by “IL-1β, IL-6, and/or TNFα proinflammatory activity” if the spontaneous or experimental disease or medical condition is associated with, or mediated by, for example, elevated levels of IL-1β, IL-6, and/or TNFα in bodily fluids or tissue, or if cells or tissues taken from the body produce elevated levels of IL-1β, IL-6, and/or TNFα in culture.

[0161] As used herein, the phrase “cardiovascular condition, disease or disorder” is intended to include all disorders characterized by insufficient, undesired or abnormal blood vessel or cardiac function, e.g. hypertension, ischemic heart disease, hypertensive heart disease and pulmonary hypertensive heart disease, valvular disease, cardiac arrhythmia, vascular disease, myocardial infarction, congestive heart failure, peripheral vascular disease, myocarditis, atherosclerosis, restenosis, and any condition which leads to congestive heart failure in a subject, particularly a human subject.

[0162] As used herein, an “IL-1β inhibitory compound” or “IL-1β inhibitor” or “inhibitor of IL-1β” refers to a compound or agent capable of specifically inhibiting or specifically preventing activation of cellular receptors to IL-1β and consequent downstream effects of IL-1β signaling.

[0163] As used herein, an “interleukin-1 receptor antagonist” (“IL-1ra”) is any agent or molecule, including small molecules and antibody or antigen-binding fragments thereof, that binds to an interleukin-1 receptor thereby preventing binding of IL-1β to the receptor and thereby inhibiting IL-1β-mediated pro-inflammatory activity.

[0164] As used herein, an “IL-6 inhibitory compound” or “IL-6 inhibitor” or “inhibitor of IL-6” refers to a compound or agent capable of specifically inhibiting or specifically preventing activation of cellular receptors to IL-1β and consequent downstream effects of IL-1β signaling.

[0165] As used herein, a “TNFα inhibitory compound” or “TNFα inhibitor” or “inhibitor of TNFα” refers to a compound or agent capable of specifically inhibiting or specifically preventing activation of cellular receptors to TNFα and consequent downstream effects of TNFα signaling.

[0166] As used herein, “antibodies” or “antigen-binding fragments” thereof include monoclonal, human, humanized or chimeric antibodies, single chain antibodies, Fab fragments, F(ab′) fragments, fragments produced by a Fab expression library, and/or binding fragments of any of the above. Antibodies also refer to immunoglobulin molecules and immunologically active portions of immunoglobulin molecules, i.e., molecules that contain antigen or target binding sites or “antigen-binding fragments.” The immunoglobulin molecules described herein can be of any type (e.g., IgG, IgE, IgM, IgD, IgA and IgY), class (e.g., IgG1, IgG2, IgG3, IgG4, IgA1 and IgA2) or subclass of immunoglobulin molecule, as is understood by one of skill in the art.

[0167] The terms “antibody fragment” or “antigen-binding fragment” include: (i) the Fab fragment, having V_{L}, C_{L}, V_{H} and C_{H}1 domains; (ii) the Fab′ fragment, which is a Fab fragment having one or more cysteine residues at the C-terminus of the C_{H}1 domain; (iii) the Fd fragment having V_{H} and C_{H}1 domains; (iv) the Fd′ fragment having V_{H} and C_{H}1 domains and one or more cysteine residues at the C-terminus of the CH1 domain; (v) the Fv fragment having the V_{L} and V_{H} domains of a single arm of an antibody; (vi) a dAb fragment (Ward et al., Nature 341, 544-546 (1989)) which consists of a V_{H} domain or a V_{L} domain; (vii) isolated CDR regions; (viii) F(ab′)₂ fragments, a bivalent fragment including two Fab′ fragments linked by a disulphide bridge at the hinge region; (ix) single chain antibody molecules (e.g. single chain Fv; scFv) (Bird et al., Science 242:423-426 (1988); and Huston et al., PNAS (USA) 85:5879-5883 (1988)); (x) “diabodies” with two antigen binding sites, comprising a heavy chain variable domain (V_{H}) connected to a light chain variable domain (V_{L}) in the same polypeptide chain (see, e.g., EP 404,097; WO 93/11161; and Hollinger et al., Proc. Natl. Acad. Sci. USA, 90:6444-6448 (1993)); (xi) “linear antibodies” comprising a pair of tandem Fd segments (V_{H}-C_{H,} 1-V_{H}-C_{H}1) which, together with complementary light chain polypeptides, form a pair of antigen binding regions (Zapata et al. Protein Eng. 8(10): 1057-1062 (1995); and U.S. Pat. No. 5,641,870); and modified versions of any of the foregoing (e.g., modified by the covalent attachment of polyalkylene glycol (e.g., polyethylene glycol, polypropylene glycol, polybutylene glycol) or other suitable polymer).

[0168] As used herein, “small molecule inhibitors” include, but are not limited to, small peptides or peptide-like molecules, soluble peptides, and synthetic non-peptidyl organic or inorganic compounds. A small molecule inhibitor or antagonist can have a molecular weight of any of about 100 to about 20,000 daltons (Da), about 500 to about 15,000 Da, about 1000 to about 10,000 Da.

[0169] As used herein, the terms “HSC cardiometabolic driver gene activating compound” or “HSC cardiometabolic driver gene potentiatior” or “HSC cardiometabolic driver gene activator” or “HSC cardiometabolic driver gene agonist” refer to a molecule or agent that mimics or up-regulates (e.g., increases, potentiates or supplements) the biological activity of a given HSC cardiometabolic driver gene, thereby decreasing or inhibiting IL-1β, IL-6, and/or TNFα proinflammatory activity caused by deficient and/or reduced activity of the HSC cardiometabolic driver gene.

[0170] The terms “biological sample” or “sample” as used herein refers to a cell or population of cells or a quantity of tissue or fluid from a subject comprising one or more hematopoietic cells. Most often, the biological sample has been removed from a subject, but the term “biological sample” can also refer to cells or tissue analyzed in vivo, i.e., without removal from the subject.

[0171] As used herein, the term “population of hematopoietic cells” encompasses a heterogeneous or homogeneous population of hematopoietic cells and/or hematopoietic progenitor cells.

[0172] The terms “isolate” and “methods of isolation,” as used herein, refer to any process whereby a cell or population of cells, such as a population of hematopoietic cells, is removed from a subject or sample in which it was originally found, or a descendant of such a cell or cells.

### BRIEF DESCRIPTION OF THE DRAWINGS

[0173] FIG. 1 shows a summary of cytokine expression effects of different clonal hematopoiesis genes.

[0174] FIG. 2 shows effects of Tet2 inactivation on LPS-induced cytokine production. Murine J774.1 cells (macrophage cell line) were stably transformed with a lentivirus vector that inactivates the expression of Tet2 (closed bars) or a control vector (open bars). Cytokine transcript levels were measured at the indicated time points after stimulation with 10 ng/ml LPS.

[0175] FIG. 3 shows effects of Dnmt3a inactivation on LPS-induced cytokine production. Murine J774.1 cells (macrophage cell line) were stably transformed with a lentivirus vector that inactivates the expression of Dnmt3a (closed bars) or a control vector (open bars). Cytokine transcript levels were measured at the indicated time points after stimulation with 10 ng/ml LPS.

[0176] FIG. 4 shows effects of Asxl1 inactivation on LPS-induced cytokine production. Murine J774.1 cells (macrophage cell line) were stably transformed with a lentivirus vector that inactivates the expression of Asxl1 (closed bars) or a control vector (open bars). Cytokine transcript levels were measured at the indicated time points after stimulation with 10 ng/ml LPS.

[0177] FIGS. 5A-5F demonstrate the effect of TP53 loss of function on LPS-induced cytokine and chemokine production. Murine neutrophils were isolated from bone marrow of TP53-heterozygous mice or WT mice. FIGS. 5A-5F. Cytokine and chemokine transcript levels were measured at indicated time points after stimulation with 10 ng/ml LPS. Analysis of transcripts revealed that IL6 (FIG. 5A), IL1β (FIG. 5A.), TNFα (FIG. 5C), CCL3 (FIG. 5D), CXCL2 (FIG. 5E), and CXCL3 (FIG. 5F) were upregulated.

[0178] FIG. 6 shows effects of overexpressing a mutant form of Ppm1d/Wip1 on LPS-induced cytokine production. Murine J774.1 cells (macrophage cell line) were stably transformed with a lentivirus vector that overexpresses a mutant form of Ppm1d/Wip1 (closed bars) or a control vector (open bars). Cytokine transcript levels were measured at the indicated time points after stimulation with 10 ng/ml LPS.

[0179] FIGS. 7A-7D show effects of overexpressing a mutant form of JAK2 (JAK2V617F) on cytokine production from unstimulated human THP-1 cells. Human THP-1 cells (macrophage cell line) were stably transformed with a lentivirus vector that overexpresses human JAK2V617F, wild-type JAK2 or a control vector. Cytokine and chemokine transcript levels were measured. FIG. 7A. Depiction of a lentiviral vector for bi-cistronic expression of the human JAK2 (WT or V617F) under CD146 enhancer and gp47 promoter with a Venus from a IRES sequence. FIG. 7B. THP-1 cells are transduced with lentiviral vector encoding JAK2-WT/sGFP, JAK2-V617F/sGFP display modest increase of JAK2, detected by western blotting. Lentiviral vector encoding Venus was used as control. FIG. 7C. THP-1 cells expressing JAK2-V617F shows enhanced STAT1 phosphorylation. No obvious increase in pSTAT3 and pSTAT5 was seen. FIG. 7D. Analysis of transcript expression in the THP-1 cells expressing sGFP, JAK2-WT/sGFP, JAK2-V617F/sGFP after 72h of differentiation. THP-1 monocytes are differentiated into macrophages by 24 h incubation with 100 nM of PMA followed by 24 h incubation in RPMI medium. Gene expression was analyzed by qPCR analysis. LTR: long terminal repeat, sGFP: superfolder green fluorescent protein, PMA: phorbol 12-myristate β-acetate.

[0180] FIGS. 8A-8C demonstrate that competitive bone marrow transplantation studies in mice revealed the selective expansion TP53-deficient cells into multiple blood cell lineages and hematopoietic progenitor cells. FIG. 8A. Mice underwent partial (30%) bone marrow reconstitution with p53-deficient cells (30% KO-BMT) or wild-type cells (30% WT-BMT) following lethal irradiation. FIG. 8B. Flow cytometry analysis of peripheral blood was performed as indicated time points. FIG. 8C. Flow cytometry analysis of peripheral blood over time course to show p53-deficient cells have a greater repopulating ability. Flow cytometry analysis of bone marrow cells to show increase of hematopoietic stem/progenitor cells in mice reconstituted 30% of p53-deficient cells compared to 30% WT-BMT mice. BMT: bone marrow transfer, WBC: white blood cell, Mono: monocyte, Neut: neutrophil, B: B cell, CD4: CD4+ T cell, CD8: CD8+ T cell, LSK: lineage−, Sca1+, c-Kit+ cell, CMP: common myeloid progenitor, GMP: granulocyte and macrophage progenitor, MDP: macrophage and dendritic cell progenitor, MEP: megakaryocyte and erythroid progenitor.

[0181] FIGS. 9A-9C demonstrate greater pathological cardiac remodeling and lung congestion following permanent LAD ligation in mice that undergo an expansion of TP53-deficient hematopoietic cells. FIG. 9A. Mice underwent partial (30%) bone marrow reconstitution with p53-deficient cells (30% KO-BMT) or wild-type cells (30% WT-BMT) following lethal irradiation. 8 weeks after recover, mice underwent LAD ligation. Echocardiography was performed at the end of study (8 weeks after LAD ligation). FIG. 9B. Echocardiographic analysis showed that 30% KO-BMT mice display worsening cardiac remodeling after LAD ligation compared to 30% WT-BMT mice. FIG. 9C. LW adjusted by TL, showing that 30%-KO mice display the increase of lung mass after LAD ligation suggesting worsening of lung congestion. BMT: bone marrow transfer, LAD: left anterior descending artery, EF: ejection fraction, LW: lung weight, TL: tibia length.

[0182] FIGS. 10A-10B demonstrate human JAK2V617F transgenic hematopoietic stem and progenitor cells preferentially expand into the neutrophil and monocyte lineage. FIG. 10A. Mice underwent partial (20%) bone marrow reconstitution with human JAK2-V617F transgenic cells (20% V617F-BMT) or wild-type cells (20% WT-BMT) following lethal irradiation. Flow cytometry analysis of peripheral blood was performed as indicated time points. FIG. 10B. Flow cytometry analysis of peripheral blood over time course to show that JAK2V617F-expressing cells have a greater competitive advantage in myeloid populations. BMT: bone marrow transfer, Neut: neutrophil, Mono: monocyte.

[0183] FIGS. 11A-11F demonstrate validation of the targeted lentivirus vector to express human JAK2V617F in myeloid lineage cells with no impact on hemoglobin or platelet levels. FIG. 11A. Depiction of a lentiviral vector for bi-cistronic expression of the human JAK2 (WT or V617F) under CD146 enhancer and gp91 promoter with a Venus from a IRES sequence. FIG. 11B. Lineage-negative cells were harvested from bone marrow of 8-week old male C57B6/J mice. Lentivirus transduction was performed ex vivo for 16-24 hours. Transduced lineage-negative cells were transplanted to the lethally irradiated male C57B6/J mice (5×105 cells/mouse). FIG. 11C. Representative flow cytometry data of peripheral blood to show myeloid specific expression of lentivirus-transduced gene in vivo. Data is obtained 8 weeks after bone marrow reconstitution. FIG. 11D. Summary of data shown in FIG. 10C. FIG. 11E. Absolute numbers of peripheral blood of Hb and Plt from WT and V617F mice to show there is no significant changes in those hematological parameters. FIG. 11F. Flow cytometry analysis of the cardiac immune cells 7 days after myocardial infarction to show the expression of lentivirally transduced Venus gene in each population. IRES: internal ribosome entry site, LTR: long terminal repeat, BM: bone marrow, PB: peripheral blood, Mono: monocyte, Neut: neutrophil, B: B cell, T: T cell, Hb: hemoglobin, Plt: platelet, Mac: macrophage.

[0184] FIGS. 12A-12D demonstrate myeloid-specific expression of JAK2V617F expression promotes pathological remodeling and broad cytokine expression in hearts subjected to permanent LAD ligation. FIG. 12A. Mice underwent partial bone marrow reconstitution with lentivirus-transduced cells (JAK2-WT or JAK2-V617F) following lethal irradiation. 8 weeks after recover, mice underwent LAD ligation. Echocardiography was performed at indicated time points. FIG. 12B. Echocardiographic analysis showed that JAK2-V617F-BMT mice display reduced cardiac function after LAD ligation compared to JAK2-WT-BMT mice. FIG. 12C. Masson-Trichrome staining to show JAK2-V617F mice display greater infarct area 2 weeks after LAD ligation. FIG. 12D. Analysis of transcript expression in the infarct zone obtained from JAK2-V617F- and JAK2-WT-BMT mice. Gene expression was analyzed by qPCR analysis. BMT: bone marrow transfer, LAD: left anterior descending artery, MI: myocardial infarction, qPCR: quantitative polymerase chain reaction.

[0185] FIGS. 13A-13D demonstrate myeloid-specific expression of JAK2V617F expression promotes pathological remodeling in hearts subjected to transverse aortic constriction (TAC). FIG. 13A. Mice underwent partial bone marrow reconstitution with lentivirus-transduced cells (JAK2-WT or JAK2-V617F) following lethal irradiation. 8 weeks after recover, mice underwent TAC surgery. Echocardiography was performed at indicated time points. FIG. 13B. Echocardiographic analysis shows that JAK2-V617F-BMT mice display worsening cardiac hypertrophy and systolic function after TAC compared with JAK2-WT-BMTmice. FIG. 13C. HW and LW adjusted by TL, showing that mice underwent bone marrow reconstitution with JAK2-V617F cells display increase of cardiac and lung mass after TAC compared to control mice transplanted with JAK2-WT cells. FIG. 13D. Cardiac fibrosis at 8 weeks after TAC surgery detected by Picrosirius staining was more severe in JAK2-V617F-BMT mice than JAK2-WT-BMT mice. BMT: bone marrow transfer, TAC: transverse aortic constriction, PWd: posterior wall thickness at diastole, FS: fractional shortening, HW: heart weight, LW: lung weight, TL: tibia length.

[0186] FIGS. 14A-14D demonstrate lentivirus-CRISPR-mediated mutation of Dnmt3a in hematopoietic cells. FIG. 14A. Lineage-negative cells were harvested from bone marrow of 8-week old male C57B6/J mice. Lentivirus transduction was performed ex vivo for 16-24 hours. Transduced lineage-negative cells were transplanted to the lethally irradiated male C57B6/J mice (5×10⁵ cells/mouse). FIG. 14B. Guide targeting sequence of Dnmt3a gene (SEQ ID NO: 105). FIG. 14C. Flow cytometry analysis of peripheral blood over time course to show the stable modification of hematopoietic cell populations. FIG. 14D. Sequencing analysis revealed deletions and insertions in Dnmt3a gene. BM: bone marrow, BMT: bone marrow transfer, WBC: white blood cells, Mono: monocytes, Neut: neutrophils. Insertions underlined. FIG. 14D discloses SEQ ID NOS 106-108, respectively, in order of appearance.

[0187] FIGS. 15A-15E demonstrate lentivirus-CRISPR-mediated mutation of Dnmt3a in hematopoietic cells accelerates heart failure in mice infused with angiotensin II. FIG. 15A. Mice underwent bone marrow reconstitution with transduced lineage-negative cells following lethal irradiation. 8 weeks after recovery, mice underwent angiotensin-II infusion (1 μg/min/kg). Echocardiography was performed at the indicated time points. FIG. 15B. Echocardiographic analysis showed adverse cardiac remodeling in mice reconstituted with Dnmt3a-targeted bone marrow cells (hematopoietic Dnmt3a-KO). FIG. 15C. HW and LW adjusted by TL, showing that hematopoietic Dnmt3a-KO mice present increased cardiac and lung mass after angiotensin-II infusion. FIG. 15D. Representative images and measurements of CSA stained with WGA shows that hematopoietic Dnmt3a-KO mice display greater hypertrophy of the myocytes. Bar indicates 25 μm. FIG. 15E. Representative images and quantitative analysis of cardiac sections stained with Picrosirius red. Hematopoietic Dnmt3a-KO mice exhibit greater cardiac fibrosis after angiotensin-II infusion. Bar indicates 1 mm. BMT: bone marrow transfer, Ang-II: angiotensin-II, PWd: posterior wall thickness at diastole, FS: fractional shortening, HW: heart weight, LW: lung weight, TL: tibia length, PBS: phowphate-buffered saline, WGA: wheat germ agglutinin, CSA: cross-sectional area of myocytes.

[0188] FIGS. 16A-16G demonstrate that hematopoietic Tet2-KO mice show greater post-infarction remodeling. FIG. 16A. Scheme of the experimental study. Mice underwent partial (10%) bone marrow reconstitution with Tet2-deficient cells (10% KO-BMT) or wild type cells (10% WT-BMT) following lethal irradiation. After 8 weeks of recovery, mice underwent permanent LAD ligation. Echocardiography was performed at the indicated time points. FIG. 16B. Tet2-KO bone marrow cells (Cd45.2+) display a competitive advantage over wild type competitor cells (Cd45.1+) in their ability to expand into multiple blood cell lineages in vivo. Peripheral blood was obtained 8 weeks and 12 weeks after BMT (before (Pre) and 4 weeks after (Post) MI, respectively) from 10% WT-BMT (n=1) mice and 10% KO-BMT mice (n=10). Statistical analysis was evaluated by evaluated by two-way ANOVA with Tukey's multiple comparison tests. FIG. 16C. Absolute numbers of WBC before (Pre) and 4 weeks after (Post) LAD ligation of 10% KO-BMT mice (n=10) and 10% WT-BMT mice (n=11). Statistical analysis was evaluated by evaluated by two-way ANOVA with Tukey's multiple comparison tests. FIG. 16D Echocardiographic analysis shows that 10% KO-BMT mice (n=10) display worsening cardiac remodeling after LAD ligation compared to 10% WT-BMT mice (n=1). Statistical analysis was evaluated by two-way repeated measure ANOVA with Sidak's multiple comparison tests. FIG. 16E. Representative images and analysis of infarct size in myocardial tissue sections from 10% WT-BMT (n=3) mice and 10% KO-BMT mice (n=3) stained with TTC 2 days after LAD ligation, showing there is no statistical significance between both groups. Hearts were sliced at 2 mm below from the ligation site. Statistical analysis was evaluated by two-tailed unpaired Student's t test. f. Representative images and analysis of fibrosis in marginal zone of myocardial tissue sections from 10% WT-BMT (n=7) mice and 10% KO-BMT mice (n=7) stained with Masson's Trichrome dye at 4 weeks after ligation, showing worsening fibrosis in 10% KO-BMT mice. The percentage of the fibrotic area was calculated with the image-J software. Statistical analysis was evaluated by two-tailed unpaired Student's t test. Scale bars indicate 100 μm. FIG. 16G. Representative images and analysis of WGA staining of the heart sections from hearts 10% WT-BMT (n=7) mice and 10% KO-BMT mice (n=7) isolated at 4 weeks after LAD ligation. Staining shows that the non-infarcted, remote area of the heart displays greater hypertrophy of the cardiac myocytes. Statistical analysis was evaluated by two-way ANOVA with Tukey's multiple comparison test. Scale bars indicate 50 μm. **p<0.01, ***p<0.001, ****p<0.0001, NS: not significant. WT: wild type, KO: knockout, BMT: bone marrow transfer, LAD: left anterior ascending artery. WBC: white blood cells, Mono: monocytes, Neut: neutrophils, LV: left ventricle, EF: ejection fraction, TTC: 2,3,5-triphenyl-tetrazolium chloride, CSA: cross-sectional area of myocytes. From left to right at each timepoint/condition on the x-axes of FIGS. 16B, 16C, 16D, 16E, 16F, and 16G is presented 10% Wt and 10% KO.

[0189] FIGS. 17A-17H demonstrate that conditional myeloid Tet2-deficiency in mice leads to worsening of cardiac remodeling in hearts subjected to LAD ligation. FIG. 17A. Scheme of the study. Control and conditional myeloid Tet2-knockout (Myelo-KO) mice underwent LAD ligation. Mice underwent permanent LAD ligation, and echocardiography was performed at the indicated time points. FIG. 17B. The efficiency of Tet2 ablation was analyzed by qPCR in BMDM at 7 days after in vitro differentiation from conditional Tet2-Myelo-KO mice and control mice (3 mice per genotype). Two-tailed Student's t test was performed for statistical analysis. FIG. 17C. Flow cytometry representative data and analysis of peripheral blood from Tet2-Myelo-KO mice (n=6) and control mice (n=6) to show there are no detectable changes in myeloid populations. Statistical significance of difference was evaluated by multiple t test. FIG. 17D. Mice survival curve after LAD ligation. The mortality of the conditional KO mice and control mice after surgery was 37.5% and 40.0%, respectively. Log-rank test was used for statistical analysis (n=20 for control mice and n=16 for conditional Tet2-KO mice). FIG. 17E. Echocardiographic evaluation shows that surviving mice with conditional Tet2 ablation in myeloid cells (n=10) display worsening cardiac remodeling after LAD ligation surgery compared to control mice (n=12). Statistical analysis was evaluated by two-way repeated measure ANOVA with Sidak's multiple comparison tests. FIG. 17F. Representative images and analysis of infarct size in myocardial tissue sections from conditional KO mice (n=3) and control (n=3) mice stained with TTC 2 days after LAD ligation. Hearts were sliced at 2 mm below from the ligation site, showing that there was no difference in initial infarct size. Statistical analysis was evaluated by Mann-Whitney U test. FIG. 17G. Representative images and analysis of fibrosis in the marginal zone of myocardial tissue sections from conditional KO mice (n=6) and control (n=6) mice stained with Masson's Trichrome dye at 4 weeks after ligation, showing worsening fibrosis in conditional KO mice. The percentage of the fibrotic area was calculated with the image-J software. Statistical analysis was evaluated by two-tailed unpaired Student's t test. Scale bars indicate 100 μm. FIG. 17H. WGA staining of the heart sections from hearts control (n=6) mice and conditional KO mice (n=6) isolated at 4 weeks after LAD ligation. Analysis of CSA shows that the non-infarcted, remote area of the heart of conditional KO mice display greater hypertrophy of the cardiac myocytes. Statistical analysis was evaluated by two-way ANOVA followed with Tukey's multiple comparison tests. Scale bars indicate 50 μm. *p<0.05, **p<0.01, ****p<0.0001, NS: not significant. WT: wild type, KO: knockout, LAD: left anterior ascending artery, qPCR: quantitative polymerase chain reaction, BMDM: bone marrow-derived macrophages, LAD: left anterior ascending artery, Mono: monocytes, Neut: neutrophils, LV: left ventricle, EF: ejection fraction, TTC: 2,3,5-triphenyl-tetrazolium chloride, WGA: wheat germ agglutinin, CSA: cross-sectional area of myocytes. From left to right at each timepoint/condition on the x-axes of FIGS. 17B, 17C, 17E, 17F, 17G, and 17G: control, myelo-KO

[0190] FIGS. 18A-18F show the effect of Tet2-deficient hematopoietic cells on the expression of pro-inflammatory cytokines and chemokines in the remodeling heart tissue. FIG. 18A. Analysis of transcript expression in the non-infarcted marginal zone obtained from 10% KO-BMT mice (n=10) and 10% WT-BMT (n=1) mice. Gene expression was analyzed by qPCR analysis. Statistical significance was evaluated by two-tailed unpaired Student's t tests with Welch's Correction when variance was unequal or by Mann Whitney U tests for data which failed to pass the Shapiro-Wilk normality test. FIG. 18B. Flow cytometry analysis of cardiac remote area from 10% KO-BMT mice (n=7) and 10% WT-BMT (n=7) mice to show the absolute number of total CD45⁺ immune cells are increased in the myocardial tissue from 10% KO-BMT mice. Data is expressed as number of cells per 100 mg wet weight. Statistical analysis was evaluated by two-tailed unpaired Student's t test. FIG. 18C. Flow cytometry analysis of cardiac remote area from 10% KO-BMT mice (n=7) and 10% WT-BMT (n=7) mice to show the absolute number of each immune cell populations. Statistical significance of difference was evaluated by multiple t tests. FIG. 18D. IL-1β immunofluorescence staining in Mac3-positive macrophage-enriched marginal zone of 10% KO-BMT (n=5) mice and 10% WT-BMT mice (n=5) showing IL-1β signal is higher in 10% KO-BMT mice. Scale bars=20 μm. Images were quantified for integrated fluorescence intensity with Image J software. Statistical analysis was performed by two-tailed unpaired Student's t tests. FIG. 18E. Remote area samples were obtained from conditional myeloid-specific KO mice and control mice, and gene expression was analyzed by qPCR at the indicated time points (n=3 for sham and n=10 at 4 weeks after LAD ligation, per genotype). Statistical significance was evaluated by two-way ANOVA with Tukey's multiple comparison tests. FIG. 18F. Bone marrow-derived macrophages 2 days after in vitro differentiation obtained from Tet2-null mice (n=6) and wild type (n=7) were obtained in vitro and gene expression was analyzed by qPCR analysis. Statistical significance of difference was evaluated by two-tailed unpaired Student's t tests with Welch's Correction when variance was unequal or by Mann Whitney U tests for data which failed to pass the Shapiro-Wilk normality test. *p<0.05, **p<0.01, ****p<0.0001. WT: wild type, KO: knockout, BMT: bone marrow transfer, LAD: left anterior ascending artery, qPCR: quantitative polymerase chain reaction, RM: remote area, Mac: macrophages, Mono: monocytes, Neut: neutrophils, B: B cells, T: T cells, ND: not detected. From left to right at each timepoint/condition on the x-axes of FIG. 18A-18F: WT, KO.

[0191] FIGS. 19A-19D demonstrate that inflammasome inhibition reverses post-infarction remodeling associated with hematopoietic Tet2-deficiency. FIG. 19A. Scheme of the experimental study. Mice underwent partial (10%) bone marrow reconstitution with Tet2-deficient cells (10% KO-BMT mice) or wild type cells (10% WT-BMT mice) following lethal irradiation. After 8 weeks of recovery, mice underwent permanent LAD ligation. 1 week after LAD ligation, MCC950 and PBS was continuously infused with osmotic pumps for 4 weeks. Echocardiography was performed at the indicated time points. FIG. 19B. Echocardiographic analysis reveals that treatment with the NLRP3 inflammasome inhibitor MCC950 protects against adverse cardiac remodeling in 10% KO-BMT and 10% WT-BMT mice, and eliminates the differences in cardiac parameters between Tet2-deficient and WT conditions at the post-LAD ligation time point of 5 weeks. Sample sizes were n=12 for 10% WT-BMT with PBS, n=12 for 10% KO-BMT with PBS, n=14 for 10% WT-BMT with MCC950, n=14 for 10% KO-BMT with MCC950. Statistical significance was evaluated by two-way repeated measure ANOVA with Tukey's multiple comparison tests. FIG. 19C. Representative images and analysis of fibrosis in marginal zone of myocardial tissue sections stained with Masson's Trichrome dye at 5 weeks after ligation. MCC950 inhibits the development of cardiac fibrosis after LAD ligation in mice reconstituted with Tet2-KO or WT bone marrow, and eliminates the differences in cell size between Tet2-deficient and WT genotypes. Statistical significances of differences among groups of 10% WT/10% KO with PBS or MCC950 were evaluated by two-way ANOVA with Tukey's multiple comparison tests. Scale bars indicate 100 μm. FIG. 19D. Representative images and analysis of WGA staining of the heart sections of hearts at 5 weeks after LAD ligation. MCC950 inhibits the development of cardiac myocyte hypertrophy after LAD ligation in mice reconstituted with Tet2-KO or WT bone marrow, and eliminates the differences in cell size between Tet2-deficient and WT genotypes. For c and d, sham-operated mice without any pump infusion were used as control (n=3 per genotype). Sample sizes were n=6 for 10% WT-BMT with PBS, n=6 for 10% KO-BMT with PBS, n=8 for 10% WT-BMT with MCC950, n=8 for 10% KO-BMT with MCC950. Statistical significances of differences among groups of 10% WT/10% KO with PBS or MCC950 were evaluated by two-way ANOVA with Tukey's multiple comparison tests. Scale bars indicate 50 μm. **p<0.01, ***p<0.001, ****p<0.0001. WT: wild type, KO: knockout, BMT: bone marrow transfer, LAD: left anterior ascending artery, PBS: phosphate-buffered saline, WGA: wheat germ agglutinin, CSA: cross-sectional area of myocytes.

[0192] FIGS. 20A-20G demonstrate that inflammasome inhibition reverses pressure overload-induced cardiac remodeling associated with hematopoietic Tet2-deficiency. FIG. 20A. Scheme of the experimental study. Mice underwent partial (10%) bone marrow reconstitution with Tet2-deficient cells (10% KO-BMT mice) or WT cells (10% WT-BMT) following lethal irradiation. After 8 weeks of recovery, mice underwent permanent TAC surgery to produce pressure overload on the heart. MCC950 or PBS were infused from 1 week after TAC. FIG. 20B. IL-1β transcripts were determined in heart samples from 10% WT-BMT (n=7) mice and 10% KO-BMT mice (n=7) after pressure overload were by qPCR analysis. Statistical significance was evaluated by Mann-Whitney U test. FIG. 20C. Representative images of Picrosirius red staining to show the heart from 10% KO-BMT mice is larger compared to the heart from 10% WT-BMT mice 5 weeks after TAC. Scale bar indicates 1 mm. FIG. 20D. HW adjusted by TL, showing that MCC950 ameliorates the increase of cardiac mass after pressure overload in both strains of mice and eliminates the differences in these parameters between the Tet2-deficient and WT conditions (n=7 for TAC with PBS and n=8 for TAC with MCC950 per genotype). Sham operated mice without any infusion were used as control (n=3 per genotype). Statistical significances of differences among groups of 10% WT/10% KO with PBS or MCC950 were evaluated by two-way ANOVA with Tukey's multiple comparison tests. FIG. 20E. Echocardiographic analysis shows that infusion with MCC950 protects against adverse cardiac remodeling in mice reconstituted with Tet2-KO and wild-type bone marrow, and eliminates the differences in cardiac parameters between Tet2-deficient and WT genotypes at the 5 weeks after TAC surgery. Echocardiography was performed at the indicated time points. Sample sizes were n=7 for 10% WT-BMT with PBS, n=7 for 10% KO-BMT with PBS, n=8 for 10% WT-BMT with MCC950, n=8 for 10% KO-BMT with MCC950. Statistical significance of difference was evaluated by two-way repeated measure ANOVA with Tukey's multiple comparison tests. FIG. 20F. Quantitative analysis of cardiac sections stained with Picro sirius red as presented in FIG. 20C. shows that mice reconstituted with Tet2-knockout bone marrow exhibit greater cardiac fibrosis after pressure overload that can be reversed by treatment with MCC950. The MCC950 treatment eliminates the difference in this parameter between the Tet2-deficient and WT conditions. Sample sizes were n=7 for 10% WT-BMT with PBS, n=7 for 10% KO-BMT with PBS, n=8 for 10% WT-BMT with MCC950, n=8 for 10% KO-BMT with MCC950. Sham mice without any infusion were used as control (n=5 per genotype). Statistical significances of differences among groups of 10% WT/10% KO with PBS or MCC950 were evaluated by two-way ANOVA with Tukey's multiple comparison tests. FIG. 20G. Representative images and measurement of CSA stained with WGA shows that MCC950 inhibits hypertrophy after pressure overload both in wild type and hematopoietic Tet2-KO mice and eliminates the difference in parameters between the Tet2-deficient and WT conditions. Sample sizes were n=7 for 10% WT-BMT with PBS, n=7 for 10% KO-BMT with PBS, n=8 for 10% WT-BMT with MCC950, n=8 for 10% KO-BMT with MCC950. Sham mice without any infusion were used as control (n=5 per genotype). Statistical significances of differences among groups of 10% WT/10% KO with PBS or MCC950 were evaluated by two-way ANOVA with Tukey's multiple comparison tests. *p<0.05, ****p<0.0001; NS: not significant. WT: wild type, KO: knockout, BMT: bone marrow transfer, TAC: transverse aortic constriction, PBS: phosphate-buffered saline, qPCR: quantitative polymerase chain reaction, HW: heart weight, TL: tibia length, WGA: wheat germ agglutinin, WGA: wheat germ agglutinin, CSA: cross-sectional area of myocytes.

[0193] FIG. 21 shows a schematic illustration of how clonal hematopoiesis promotes heart failure. The illustration shows that tomatic Tet2 mutations within hematopoietic stem and progenitor cells (HSPC) will lead to their clonal amplification and these HSPC give rise to myeloid cell progeny that promote cardiac remodeling through excessive production of interleukin-1beta (IL-1J3).

[0194] FIG. 22 shows the flow cytometry gating strategy of peripheral blood after competitive BMT. Cells were defined as: (i) total white blood cells (CD45⁺), (ii) Ly6C^{hi} monocytes (CD115^{high} Ly6G⁻, CD43^{low}, Ly6C^{high}), (iii) Ly6C^{lo} monocytes (CD115^{high}, Ly6G⁻, CD43^{high}, Ly6C^{low}), (iv) neutrophils (CD115^{low}, Ly6G⁺), (v) B cells (CD3e⁻, B220⁺), (vi) T cells (CD3e⁺, B220⁻, CD4/8⁺). CD45.1 and CD45.2 were used to determine the chimerism in each population. BMT: bone marrow transfer. WBC: white blood cells, Neut: neutrophils, Mono: monocytes, B: B cells, T: T cells.

[0195] FIGS. 23A-23C show the flow cytometry gating strategy of cardiac tissues. FIG. 23A. scheme of the sampling of heart tissue after LAD ligation. Hearts were divided into remote area and infarct area with marginal zone. FIG. 23B. Myeloid panel of infarct area (6 days after MI). FIG. 23C. Lymphoid panel of infarct area (14 days after MI). Cells were defined as: (i) total white blood cells (CD45⁺), (ii) neutrophils (CD11b⁺, Ly6G⁺), (iii) Ly6C^{hi} monocytes (CD11b⁺, Ly6G⁻, Ly6C^{hi}, F4/80^{lo}), (iv) macrophages (CD11b⁺, Ly6G⁻, Ly6C^{lo}, F4/80^{hi}), (v) B cells (CD11b⁻, CD3e⁻, B220⁺, CD19⁺), (vi) T cells (CD11b⁻, CD3e⁺, B220⁻, CD4/8⁺). RM: remote area, IA infarct area, MZ: marginal zone, MI: myocardial infarction, Neut: neutrophils, Mac: macrophages, Mono: monocytes, B: B cells, T: T cells.

[0196] FIGS. 24A-24D shows an increase in LSK cells in the bone marrow of donor 6-8 week old Tet2-deficient mice. FIG. 24A. Flow cytometry gating strategy of bone marrow hematopoietic stem/progenitor cells. FIG. 24B. Flow cytometry gating strategy of bone marrow myeloid cells. Cells were defined as: (i) LSK cells (Lin⁻, c-Kit⁺, Sca1⁺), (ii) GMP (Lin⁻, c-Kit⁺, Sca1⁻, CD34⁺, CD16/32^{hi}, CD115⁻), (iii) GMP (Lin, c-Kit⁺, Sca1⁻, CD34⁺, CD16/32^{hi}, CD115⁺), (iv) monocytes (CD11b⁺, CD115⁺), (v) neutrophils (CD11b⁺, CD115⁻, Ly6G⁺, MHC-II⁻). FIG. 24C. The number of each populations in 2.5×10⁶ bone marrow cells from Tet2-deficient mice (n=7) and wild type mice (n=7). All mice are 6-8 weeks old. Statistical significance of difference was evaluated by two-tailed unpaired Student's t tests or by Mann Whitney U tests for data which failed to pass the Shapiro-Wilk normality test. From left to right on each x-axis is shown WT and KO. FIG. 24D. The weight of the spleen from Tet2-deficient mice (n=5) and wild type mice (n=5) to show there is no significant difference between both genotypes at this age. Statistical analysis was evaluated by two-tailed unpaired Student's t test with Welch's correction. GMP: granulocyte-macrophage progenitors, MDP: monocyte-dendritic cell progenitors, Neut: neutrophils, Mono: monocytes.

[0197] FIG. 25 demonstrates that Tet2-deficient hematopoietic stem cells display a greater repopulating ability in vivo. Tet2-KO bone marrow cells (Cd45.2⁺) display a competitive advantage over wild type competitor cells (Cd45.1⁺) in their ability to expand into multiple blood cell lineages in vivo. Peripheral blood was obtained 8 weeks after BMT from 10% WT-BMT (n=1) mice and 10% KO-BMT mice (n=10). Statistical analysis was evaluated by multiple t tests. **p<0.01, ****p<0.0001. WBC: white blood cells, Mono: monocytes, Neut: neutrophils, B: B cells, T: T cells.

[0198] FIGS. 26A-26B demonstrate that LAD ligation does not affect Tet2-deficient peripheral blood chimerism. FIG. 26A. Scheme of the experimental study. Mice underwent partial (10%) bone marrow reconstitution with Tet2-deficient cells or WT cells following lethal irradiation. After 8 weeks of recovery, mice underwent permanent LAD ligation (MI). Blood chimerism was analyzed by flow cytometry at 4 weeks after ligation. FIG. 26B. The percentage of the CD45.2⁺ cells in different peripheral blood lineages. Sample sizes were n=5 for 10% WT-BMT/sham, n=4 for 10% KO-BMT/sham, n=5 for 10% WT-BMT/MI, n=5 for 10% KO-BMT/MI. From left to right the series for each condition are: 10% WT-BMT/sham, 10% WT-BMT/MI, 10% KO-BMT/sham, 10% KO-BMT/MI. Statistical significance was evaluated by two-way ANOVA with Tukey's multiple comparison tests. NS: not significant. HSPC: hematopoietic stem progenitor cells, WT: wild type, KO: knockout, LAD: left anterior ascending artery, MI: myocardial infarction, WBC: white blood cells, Neut: neutrophils, Mono: monocytes, B: B cells, T: T cells.

[0199] FIG. 27 shows survival curves of Tet-2 deficient mice with partial BMT after LAD ligation. WT: wild type, KO: knockout, NS: not significant. The statistical analysis of Kaplan-Meier Curve was evaluated by log-rank test.

[0200] FIGS. 28A-28C demonstrate a dose-dependent impact of HSPC Tet2-deficiency on post-MI cardiac remodeling. FIG. 28A. Scheme of the experimental study. Mice underwent partial (10%) bone marrow reconstitution with Tet2-homozygous null cells or Tet2-heterogyzous cells or WT cells following lethal irradiation. After 8 weeks of recovery, mice underwent permanent LAD ligation (MI). FIG. 28B. Tet2-homozygous null cells or Tet2-heterogyzous bone marrow cells (Cd45.2⁺) display a competitive advantage over wild type competitor cells (Cd45.1⁺) in their ability to expand into multiple blood cell lineages in vivo. Peripheral blood was obtained 4 weeks and 8 weeks after BMT. Sample sizes were 5 per genotype. Statistical analysis was evaluated by two-way repeated measure ANOVA with Sidak's multiple comparison tests. FIG. 28C. Echocardiographic evaluation of the mice 4 weeks after BMT. Sample sizes were 5 per genotype. Statistical significance was evaluated by one-way ANOVA with Tukey's multiple comparison tests. *p<0.05, **p<0.01, ***p<0.001, ****p<0.0001; NS: not significant. HSPC: hematopoietic stem progenitor cells, WT: wild type, Het: heterozygote, KO: knockout, BMT: bone marrow transfer, LAD: left anterior ascending artery, MI: myocardial infarction, LV: left ventricle, EF: ejection fraction.

[0201] FIGS. 29A-29B show myeloid-specific Tet2-deficient mice do not show obvious changes in hematological parameters. FIG. 29A. Absolute numbers of peripheral blood of Hb, WBC, and Plt from Tet2-Myelo-KO mice (n=6) and control mice (n=6) to show there is no significant changes in those hematological parameters. Statistical significance was evaluated by two-tailed unpaired Student's t tests or by Mann Whitney U tests for data which failed to pass the Shapiro-Wilk normality test. FIG. 29B. Flow cytometry representative data and analysis of peripheral blood from Tet2-Myelo-KO mice (n=6) and control mice (n=6) to show there is no significant changes in lymphoid populations. Statistical significance of difference was evaluated by multiple t test. Hb: hemoglobin, WBC: white blood cells, Plt: platelets, B: B cells, T: T cells, NS: not significant.

[0202] FIGS. 30A-30B show the flow cytometry analysis of cardiac remote area and infarct area in hematopoietic Tet2-deficient mice. FIG. 30A. Flow cytometry analysis of cardiac remote area from 10% KO-BMT mice (n=7) and 10% WT-BMT (n=7) mice to show the relative proportion of immune cell populations. Statistical analysis was evaluated by multiple t tests. FIG. 30B. Flow cytometry analysis of cardiac infarct area with marginal zone from the same mice of a. to show the absolute number of CD45⁺ cells (left panel) and macrophages (right panel). Statistical significance of difference was evaluated by two-tailed unpaired Student's t test or by Mann Whitney U tests for data which failed to pass the Shapiro-Wilk normality test. *p<0.05, **p<0.01. WT: wild type, Het: heterozygote, KO: knockout, BMT: bone marrow transfer, RM: remote area, IA: infarct area, MZ: marginal zone, Mac: macrophages, Mono: monocytes, Neut: neutrophils, B: B cells, T: T cells.

[0203] FIGS. 31A-31B demonstrate that hematopoietic Tet2-KO mice do not show obvious change of the macrophages proliferation. FIG. 31A. Representative data of the Ki67 (green) and Mac3 (red) immunofluorescence staining of the marginal zone from 10% KO-BMT mice (n=6) and 10% WT-BMT (n=6). DAPI is used to detect nuclei (blue). Heart tissue samples are obtained 4 weeks after LAD ligation. Scale bars indicate 20 μm. FIG. 31B. The number of Mac3⁺ cells (left panel) and the ratio of Ki67⁺ cells over Mac3⁺ cells (right) are shown. Unpaired two-tailed Student's t test was performed for statistical analysis. Scale bar, 100 μm. WT: wild type, KO: knockout, LAD: left anterior ascending artery.

[0204] FIGS. 32A-32B demonstrate that MCC950 does not impact the peripheral blood chimerism. FIG. 32A. Scheme of the experimental study. Mice underwent partial (10%) bone marrow reconstitution with Tet2-deficient cells or WT cells following lethal irradiation. After 4 weeks of recovery, mice underwent MCC950 or PBS infusion. Blood chimerism was analyzed by flow cytometry at 0 and 2 weeks after infusion. FIG. 32B. The percentage of the CD45.2⁺ cells in different peripheral blood lineages before and after MCC950/PBS infusion. Sample sizes were n=3 for 10% WT-BMT/PBS, n=3 for 10% KO-BMT/PBS, n=4 for 10% WT-BMT/MCC950, n=4 for 10% KO-BMT/MCC950. Statistical significance was evaluated by two-way ANOVA with Tukey's multiple comparison tests. *p<0.05, ***p<0.001; NS: not significant. HSPC: hematopoietic stem progenitor cells, WT: wild type, KO: knockout, BMT: bone marrow transfer, PBS: phosphate-buffered saline, WBC: white blood cells, Mono: monocytes.

[0205] FIGS. 33A-33I demonstrate that conditional myeloid Tet2-deficiency in mice leads worse cardiac remodeling during pressure overloaded hypertrophy. FIG. 33A. Scheme of the experimental study. Conditional myeloid Tet2-knockout mice and control mice underwent TAC and echocardiography was performed at the indicated time points. FIG. 33B. Echocardiographic evaluation shows that mice with conditional Tet2 ablation in myeloid cells (n=9) display worsening cardiac remodeling after TAC surgery compared to control mice (n=9). The echocardiographic measurement time points are indicated. Statistical analysis was evaluated by two-way repeated measure ANOVA with Sidak's multiple comparison tests. FIG. 33C. Representative images of Picrosirius Red stained cardiac sections. Hearts from conditional Tet2-KO mice appear larger compared to the hearts from control mice at 8 weeks after TAC. FIG. 33D. Measurements of HW and LW normalized to TL. Statistical significance was evaluated by two-way ANOVA with Tukey's multiple comparison tests. Sample sizes were n=3 for control/sham, n=3 for conditional Tet2-KO/sham, n=9 for control/TAC, n=9 for conditional Tet2-KO/TAC. FIG. 33E. Quantitative analysis of cardiac sections stained with Picrosirius red as presented in FIG. 33C. shows that conditional Tet2-KO mice (n=8) exhibit greater cardiac fibrosis after pressure overload then control mice (n=8) 8 weeks after TAC. For the 0 time point, 3 sham-treated mice were also used as used per genotype. The percentage of the fibrotic area was calculated with the image-J software. Statistical analysis was evaluated by two-way ANOVA with Tukey's multiple comparison tests. FIG. 33F. WGA staining of the heart sections from hearts from conditional Tet2-KO mice (n=8) and control mice (n=8) isolated at 8 weeks after TAC showing that conditional KO mice display greater hypertrophy of the cardiac myocytes. 3 sham mice were used as used per genotype. Statistical analysis was evaluated by two-way ANOVA with Tukey's multiple comparison tests. FIG. 33G. Hearts from conditional myeloid Tet2-deficient mice upregulate of IL-1β transcript after pressure overload. Remodeling heart tissue samples were obtained from control (n=8) mice and conditional KO mice (n=8) and gene expression was analyzed by qPCR analysis. For the 0 time point, sham-treated mice were used (n=8 per genotype). Statistical significance was evaluated by two-way ANOVA with Tukey's multiple comparison tests. FIG. 33H. Flow cytometry analysis of hypertrophied myocardium from Tet2-Myelo-KO mice (n=7) and control (n=7) mice to show the absolute number of total CD45⁺ immune cells are increased in the tissue from Tet2-Myelo-KO mice. Data is expressed as number of cells per 100 mg wet weight. Statistical analysis was evaluated by two-tailed unpaired Student's t test. FIG. 33I. Flow cytometry analysis of hypertrophied myocardium from Tet2-Myelo-KO mice (n=7) and control (n=7) mice to show the relative proportion (left panel) and absolute number (right panel) of each immune cell populations. Statistical significance of difference was evaluated by multiple t tests. *p<0.05, **p<0.01, ***p<0.001, ****p<0.0001; NS: not significant. WT: wild type, Myelo-KO: myeloid-specific knockout, TAC: transverse aortic constriction, HW: heart weight, LW: lung weight, TL: tibia length, LVPWTd: left ventricular posterior wall thickness at end diastole, FS: fractional shortening, qPCR: quantitative polymerase chain reaction, CSA: cross-sectional area of myocytes, Mac: macrophages, Mono: monocytes, Neut: neutrophils, B: B cells, T: T cells. In all graphs, the first series is control, and the second series is myelo-KO.

[0206] FIGS. 34A-34D demonstrate that CRISPR/Cas9 (clustered regularly interspaced short palindromic repeats/clustered regularly interspaced short palindromic repeat-associated 9)-mediated Tet2 gene disruption confers a competitive advantage to the hematopoietic stem/progenitor cells (HSPCs). FIG. 34A. Bone marrow lineage-negative cells from wild-type mice were transduced with lentivirus particles expressing Cas9/eGFP (enhanced green fluorescent protein) and delivered to lethally irradiated wild-type mice. FIG. 34B. Flow cytometry analysis of HSPC transduction by lentivirus. Cells are defined as LSK cells (lineage⁻, c-kit⁺, Sca-1⁺) and HSC (hematopoietic stem cell; CD48⁻, CD150⁺ in LSK cells). Transduced cells are GFP positive (n=4). FIG. 34C. Flow cytometry analysis of the peripheral blood at 4 and 16 wk after reconstitution with bone marrow transduced with Tet2 (ten-eleven translocation-2)-targeted and control (no Tet2 guide RNA) lentivirus vectors. The percentage of GFP⁺ cells in both experimental groups is shown (n=6 in both Tet2-indel [insertion and deletion] mice and control mice). Statistical analysis was evaluated by 2-way repeated measure ANOVA with Sidak multiple comparison tests. FIG. 34D. Results of the TA cloning procedure showing that GFP peripheral white blood cells harbor edited Tet2 genes. The wild-type Tet2 sequence is shown for reference. *P<0.05, **P<0.01, ****P<0.0001. BM indicates bone marrow; Mono, monocyte; Neut, neutrophil; Sca-1, stem cells antigen-1; SSC, side scatter; and WBC, white blood cell. FIG. 34D discloses SEQ ID NOS 109-113, respectively, in order of appearance.

[0207] FIGS. 35A-35H show a phenotype comparison of Ang II (angiotensin-II) infusion-induced cardiac dysfunction between conventional competitive bone marrow transplant (BMT) model and lenti-CRISPR/Cas9 (clustered regularly interspaced short palindromic repeats/clustered regularly interspaced short palindromic repeat-associated 9) model. FIGS. 35A-35D shows the experimental results obtained from the conventional competitive BMT model. FIGS. 35E-35H, Data from lenti-CRISPR/Cas9 model. FIG. 35A. Echocardiographic analysis at the indicated time points after Ang II infusion (12 mice per group). Statistical analysis was evaluated by 2-way repeated measures ANOVA with Sidak multiple comparison tests. The first series is 10% WT and the second series is 10% Tet2-KO. FIG. 35B. Heart weight (HW) adjusted by TL at the end of the study (8 wk). Statistical analysis was evaluated by 2-way ANOVA with Sidak multiple comparison tests. FIG. 35C. Representative images and analysis of WGA (wheat germ agglutinin) staining of the heart sections from hearts of 10% knockout (KO)-BMT mice and 10% WT (wild type)-BMT mice at the end of the study. Statistical analysis was evaluated by 2-way ANOVA with Sidak multiple comparison tests (scale bar=25 μm). FIG. 35D. Representative images and analysis of Picrosirius red staining of the heart sections from hearts of 10% KO-BMT mice and 10% WT-BMT mice at the end of the study. Statistical analysis was evaluated by 2-way ANOVA with Sidak multiple comparison tests (scale bar=1 mm). The first series is WT and the second series is Tet2-indel. For FIGS. 35B-35D, n=12 for Ang II groups and n=5 for PBS groups were analyzed. FIG. 35E. Echocardiographic analysis at indicated time points after Ang II infusion (6 mice per group). Statistical analysis was evaluated by 2-way repeated measures ANOVA with Sidak multiple comparison tests. FIG. 35F. HW adjusted by TL at the end of the study (8 wk). Statistical analysis was evaluated by Mann-Whitney U test. FIG. 35G Representative images and analysis of WGA staining of the heart sections from hearts of Tet2 (ten-eleven translocation-2)-indel (insertion and deletion) mice and control mice at the end of the study (scale bar=1 mm). Statistical analysis was evaluated by 2-tailed unpaired Student t test. FIG. 35H Representative images and analysis of Picrosirius staining of the heart sections from hearts of Tet2-indel mice and control mice at the end of the study (scale bar=25 μm). Statistical analysis was evaluated by 2-tailed unpaired Student t test. For FIGS. 35E-35H, n=6 per group were analyzed. **P<0.01, ***P<0.001, ****P<0.0001. CSA indicates cross-sectional area; FS, fractional shortening; HW, heart weight; and TL, tibia length.

[0208] FIGS. 36-36F demonstrate that CRISPR/Cas9 (clustered regularly interspaced short palindromic repeats/clustered regularly interspaced short palindromic repeat-associated 9)-mediated hematopoietic Dnmt3a gene disruption promotes cardiac dysfunction after Ang II (angiotensin II) infusion. FIG. 36A. Flow cytometry analysis of the peripheral blood at 4 and 16 wk after bone marrow reconstitution. The percentages of GFP⁺ (green fluorescent protein) cells in both experimental groups are shown (n=13 in both Dnmt3a [DNA (cytosine-5)-methyltransferase 3a]-indel [insertion and deletion] mice and control mice). Statistical analysis was evaluated by 2-way repeated measures ANOVA with Sidak multiple comparison tests. FIG. 36B. The result of the TA cloning procedure showing that GFP⁺ peripheral white blood cells harbor edited Dnmt3a genes. The wild-type Dnmt3a sequence is shown for reference. FIG. 36B discloses SEQ ID NOS 114 and 106-108, respectively, in order of appearance. FIG. 36C. Echocardiographic analysis at indicated time points after Ang II infusion (10 mice per group). Statistical analysis was evaluated by 2-way repeated measures ANOVA with Tukey multiple comparison tests. FIG. 36D. Heart weight (HW) adjusted by TL at the end of the study (2 mo). Statistical analysis was evaluated by 2-way ANOVA with Tukey multiple comparison tests. FIG. 36E. Representative images and analysis of Picrosirius staining of the heart sections from hearts of Dnmt3a-indel mice and control mice at the end of the study (scale bar=1 mm). Statistical analysis was evaluated by 2-way ANOVA with Tukey multiple comparison tests. FIG. 36F. Representative images and analysis of WGA (wheat germ agglutinin) staining of the heart sections from hearts of Dnmt3a-indel mice and control mice at the end of the study (scale bar=25 μm). Statistical analysis was evaluated by 2-way ANOVA with Tukey multiple comparison tests. For FIGS. 36D-36F, n=10 for Ang II groups and n=7 for PBS groups were analyzed. NS indicates nonsignificant. ***P<0.001, ****P<0.0001. CSA indicates cross-sectional area; FS, fractional shortening; Mono, monocyte; Neut, neutrophil; TL, tibia length; and WBC, white blood cell. For the graphs in FIGS. 36C-36F, the series are, from left to right: PBS Control, PBS Dnmt3a-Indel, AngII Control, AngII Dnmt3a-Indel.

[0209] FIGS. 37A-37D demonstrate that hematopoietic Dnmt3a (DNA [cytosine-5]-methyltransferase 3a) loss of function enhances cardiac inflammation. FIG. 37A. Western blot analysis revealing decrease in Dnmt3a expression in J774.1 cells treated with lentivirus-mediated Dnmt3a knockout. The lentivirus without sgRNA (single guide RNA) was used as control. FIG. 37B. Gene expression analysis of WT (wild type), Tet2 (ten-eleven translocation-2)-indel (insertion and deletion), and Dnmt3a-indel J774.1 cells at 6 h after stimulation with 10 ng/mL lipopolysaccharide (LPS). Statistical analysis was evaluated by 2-way ANOVA with Tukey multiple comparison tests. FIG. 37C. Representative images and analysis of Mac2 staining of the sections of hearts from Dnmt3a-indel mice and control mice at 8 wk after Ang II (angiotensin II) infusion (n=6 per group; scale bar=100 μm). Statistical analysis was evaluated by Mann-Whitney U test. FIG. 37D. Gene expression analysis of heart from Dnmt3a-indel and control mice (n=10 per group) 8 wk after Ang II infusion. Statistical analysis was evaluated by 2-tailed unpaired Student t test or Mann-Whitney U test. NS indicates nonsignificant. *P<0.05, **P<0.01, ***P<0.001, ****P<0.0001. Mac2 indicates macrophage-2 antigen; and NT, nontreated.

[0210] FIGS. 38A-38E show the validation of gRNA targeting Tet2 and Dnmt3a. FIG. 38A. Depiction of a lentiviral vector containing the gRNA targeting Tet2 or Dnmt3a under the control of the U6 promoter (U6) and Cas9 under the control of the short EF1a promoter (EFS). eGFP is bicistronically expressed using picorna virus-derived 2A auto-cleavage site (P2A) system. FIG. 38A discloses SEQ ID NOS 115 and 103, respectively, in order of appearance. FIG. 38B. Schema of the experimental study. PX459 plasmid encoding gRNA targeting Tet2 or Dnmt3a under the control of U6 promoter and Cas9 under the control of the CMV promoter is transfected to Nl H-3T3 cells. After 48 hours selection with puromycin (2 mg/ml), followed by 1 week for recovery, cells are collected for analysis. FIG. 38C. Result of T7 endonuclease 1 mismatch cleavage assay performed with genomic DNA from Nl H-3T3 cells transfected with 3 sequences of gRNA targeting Tet2. FIG. 38D Result of T7 endonuclease 1 mismatch cleavage assay performed with genomic DNA from Nl H-3T3 cells transfected with gRNA targeting Dnmt3a. FIG. 38E. Western immunoblot analysis to show that Dnmt3a is ablated in Nl H-3T3 cells.

[0211] FIGS. 39A-39B shows the schema of this study. FIG. 39A. Mice underwent partial (10%) bone marrow reconstitution with Tet2-deficient cells (10% knockout-bone marrow transfer) or wild-type cells (10% WT-BMT) following lethal irradiation. After 8 weeks of recovery, mice underwent Angll infusion. FIG. 39B. Bone marrow lineage-negative cells from wild type mice were transduced with lentivirus particles harboring gRNA and Cas9/eGFP into lethally irradiated wild type mice, followed by Angll infusion for 8 weeks. Echocardiography was performed at the indicated time points.

[0212] FIG. 40 shows the flow cytometry gating strategy of peripheral blood. Cells were defined as: (i) total white blood cell (CD45+), (ii) monocytes (CD115⁺, Ly6G⁻), (iii) neutrophils (Ly6G⁺, CD115⁻), (iv) B cells (CD115⁻, Ly6G⁻, CD3e⁻, B220⁺), (v) T cells (CD115⁻, Ly6G⁻, CD3e⁺, B220⁻). The percentage of GFP⁺ cells in these populations were measured by using the negative control (GFP⁻) as a reference.

[0213] FIG. 41 demonstrates that Tet2-KO bone marrow cells to preferentially expand into multiple blood cells in vivo. Mice underwent partial (10%) bone marrow reconstitution with Tet2-deficient cells (10% KO) or wild-type cells (10% WT) following lethal irradiation. After 8 weeks of recovery, flow cytometry analysis of peripheral blood was performed. Statistical significance was evaluated by two-tailed unpaired Student's t test or Mann-Whitney U test. *p<0.01, ***p<0.001.

[0214] FIGS. 42A-42C show a higher magnification of cardiac fibrosis. FIG. 42A. Representative images and analysis of Picro sirius staining. Heart sections from mouse reconstituted with Tet2-deficient bone marrow cells (10% KO) or wild-type bone marrow cells (10% WT). FIG. 42B. Heart sections from Tet2-indel mice. FIG. 42 C. Heart sections from Dnmt3a-indel mice. Scale bar: 100 mm.

[0215] FIGS. 43A-43C demonstrate that Myeloid-specific Tet2 gene disruption promotes cardiac dysfunction after Ang-II infusion. FIG. 43A. Echocardiographic analysis of myeloid-specific (LysM-cre) myelo-Tet2-KO mice and control mice at indicated time points after Angll infusion (10 mice per group). Statistical analysis was evaluated by two-way ANOVA with Sidak's multiple comparison tests. FIG. 43B. Analysis of WGA staining of the heart sections from hearts of myelo-Tet2-KO mice and control mice at the end of the study. Statistical analysis was evaluated by two-way ANOVA with Tukey's multiple comparison tests. FIG. 43C. Analysis of picrosirius staining of the heart sections from hearts of myelo-Tet2-KO mice and control mice at the end of the study. Statistical analysis was evaluated by two-way ANOVA with Tukey's multiple comparison tests. p<0.05, **p<0.01, ***p<0.001, ****p<0.0001.

[0216] FIGS. 44A-44B demonstrate that CRISPR/Cas9-mediated mutation of Tet2 and Dnmt3a in HSPC promotes AngII-induced renal fibrosis. FIG. 44A. Representative images and analysis of Masson's trichrome staining of the kidney sections from kidney of Tet2-indel mice and control mice at the end of the study. Statistical analysis was evaluated by two-tailed unpaired Student's t test. FIG. 44B. Representative images and analysis of Masson's trichrome staining of the kidney sections from kidney of Dnmt3a-indel mice and control mice at the end of the study. Statistical analysis was evaluated by two-way ANOVA with Tukey's multiple comparison tests. Scale bar: 100 mm. *p<0.05, ****p<0.0001.

### DETAILED DESCRIPTION

[0217] Advances in DNA sequencing have revealed that aging is associated with an increased frequency of somatic mutations in proliferative tissues, particularly in the hematopoietic system. Recently, large exome sequencing studies in humans have shown that aging is associated with an increased frequency of somatic mutations in the hematopoietic system which provide a competitive growth advantage to the mutant cell and therefore allow its clonal expansion, referred to herein as “clonal hematopoiesis” (Jaiswal et al, Genovese et al. NEJM 2014; Xi et al, Nat Med 2014). Furthermore, recent studies employing ultra-deep sequencing demonstrate that somatic mutations in blood cells are much more prevalent than previously recognized (McKerrell, Cell Reports 2015). However, while recent human studies demonstrate that somatic mutations can be associated with a broad spectrum of human disease, there is a lack of experimental evidence supporting their causal contribution to age-associated disorders other than cancer (Science special issues on “Mutation and Human Disease” (September 2015) and “Why we Age” (December 2015)). In contrast, experimental evidence is provided herein that mechanistically links clinically relevant somatic mutations in cells of hematopoietic origin to cardiovascular disease (CVD), metabolic, renal, and other chronic diseases that have a large inflammatory component. The experimental demonstrations described herein provide novel evidence of the causal contribution of a scenario of genome mosaicism in the hematopoietic system and subsequent clonal hematopoiesis to a non-hematological disorder.

[0218] Epidemiological studies show that HSPCs develop mutations that promote their clonal expansion at a relatively high frequency in the aging population. While very few of the HSCs acquire subsequent mutations in oncogenes that lead to blood cancers, the mechanistic findings of the studies described herein, using TP53, JAK2, and DNMT3A as examples, show that a single gene mutation that occurs frequently can predispose an individual to CVD and stroke that are common in the elderly (>50% of individuals). The studies described herein demonstrate that somatic mutations in genes such as TP53, JAK2, DNMT3A, ASXL1, and PPM1D/WIP1 in HSCs, termed herein as “HSC cardiometabolic driver genes,” that lead to increased production of inflammatory cytokines, such as IL-1β, IL-6, and TNF, can lead to various signs and symptoms of cardiovascular disease and pathological remodeling. As demonstrated herein, TP53 mediated hematopoietic cell expansion contributes to pathological remodeling in heart failure. Competitive bone marrow transplantation studies in mice revealed the selective expansion TP53-deficient cells into multiple blood cell lineages and features consistent with an exacerbated heart failure phenotype. Further, as demonstrated herein, a somatic activating mutation V617F in JAK2 in hematopoietic cells led to greater pathological remodeling of the heart following injury, and was accompanied by the broad over-activation of cytokines, including IL-6, IL-1β and TNFα, in the heart. In addition, hematopoietic cell mutation of Dnmt3a was demonstrated herein to lead to diminished cardiac function, increased cardiac hypertrophy, increased myocyte hypertrophy, and increased cardiac fibrosis. Thus, the data provided herein show that somatic mutations in HSC cardiometabolic driver genes, such as TP53, JAK2, DNMT3A, ASXL1, and PPM1D/WIP1, and consequent clonal hematopoiesis, can contribute to pathological cardiac remodeling following injury and facilitate heart failure.

[0219] “TP53” or “tumor protein 53,” which is encoded on human chromosome 17, is a tumor suppressor protein containing transcriptional activation, DNA binding, and oligomerization domains. The encoded protein is known to respond to diverse cellular stresses to regulate expression of target genes, thereby inducing cell cycle arrest, apoptosis, senescence, DNA repair, or changes in metabolism. Mutations in this gene are associated with a variety of human cancers, including hereditary cancers such as Li-Fraumeni syndrome.

[0220] Accordingly, the term “TP53” as used herein, refers to the genomic sequence of NG_017013.2 (SEQ ID NO: 1) encoding: the mRNA sequence of NM_000546.5 (isoform a, SEQ ID NO: 2), which encodes the polypeptide having the amino acid sequence of NP_000537.3 (isoform a, SEQ ID NO: 3); the mRNA sequence of NM_001126112.2 (isoform a2, SEQ ID NO: 4) encoding the polypeptide having the amino acid sequence of NP_001119584.1 (isoform a2, SEQ ID NO: 5); the mRNA sequence of NM_001126113.2 (isoform c, SEQ ID NO: 6) encoding the polypeptide having the amino acid sequence of NP_001119585.1 (isoform c, SEQ ID NO: 7); the mRNA sequence of NM_001126114.2 (isoform b, SEQ ID NO: 8) encoding the polypeptide having the amino acid sequence of NP_001119586.1 (isoform b, SEQ ID NO: 9); the mRNA sequence of NM_001126115.1 (isoform d, SEQ ID NO: 10) encoding the polypeptide having the amino acid sequence of NP_001119587.1 (isoform d, SEQ ID NO: 11); the mRNA sequence of NM_001126116.1 (isoform e, SEQ ID NO: 12) encoding the polypeptide having the amino acid sequence of NP_001119588.1 (isoform e, SEQ ID NO: 13); the mRNA sequence of NM_001126117.1 (isoform f, SEQ ID NO: 14) encoding the polypeptide having the amino acid sequence of NP_001119589.1 1 (isoform f, SEQ ID NO: 15); the mRNA sequence of NM_001126118.1 (isoform g, SEQ ID NO: 16) encoding the polypeptide having the amino acid sequence of NP_001119590.1 (isoform g, SEQ ID NO: 17); the mRNA sequence of NM_001276695.1 (isoform h, SEQ ID NO: 18) encoding the polypeptide having the amino acid sequence of NP_001263624.1 (isoform h, SEQ ID NO: 19); the mRNA sequence of NM_001276696.1 (isoform i, SEQ ID NO: 20) encoding the polypeptide having the amino acid sequence of NP_001263625.1 (isoform i, SEQ ID NO: 21); the mRNA sequence of NM_001276697.1 (isoform j, SEQ ID NO: 22) encoding the polypeptide having the amino acid sequence of NP_001263626.1 (isoform j, SEQ ID NO: 23); the mRNA sequence of NM_001276698.1 (isoform k, SEQ ID NO: 24) encoding the polypeptide having the amino acid sequence of NP_001263627.1 (isoform k, SEQ ID NO: 25); the mRNA sequence of NM_001276699.1 (isoform 1, SEQ ID NO: 26) encoding the polypeptide having the amino acid sequence of NP_001263628.1 (isoform 1, SEQ ID NO: 27); the mRNA sequence of NM_001276760.1 (isoform g1, SEQ ID NO: 28) encoding the polypeptide having the amino acid sequence of NP_001263689.1 (isoform g 1, SEQ ID NO: 29); and the mRNA sequence of NM_001276761.1 (isoform g2, SEQ ID NO: 30) encoding the polypeptide having the amino acid sequence of NP_001263690.1 (isoform g2, SEQ ID NO: 31), together with any additional naturally occurring allelic, splice variants, and processed forms thereof. Typically, as used herein, TP53 refers to human TP53. Reference to specific sub-fragments or sub-sequences of TP53 can be identified in the application, e.g., by “nucleic acids 211-402 of TP53 of SEQ ID NO: 1.” Specific nucleic acid or amino acid residues of TP53 can be referred to as, for example, “A282 of TP53 of SEQ ID NO: 1” or A282 of SEQ ID NO: 1.”

[0221] “DNMT3A” or “DNA (cytosine-5-1-methyltransferase 3 alpha,” which is encoded on human chromosome 2, encodes a DNA methyltransferase that is believed to function in de novo methylation, rather than maintenance methylation. DNMT3A localizes to the cytoplasm and nucleus and its expression is developmentally regulated.

[0222] Accordingly, the term “DNMT3A” as used herein, refers to the genomic sequence of NG_029465.2 (SEQ ID NO: 32) encoding: the mRNA sequence of NM_001320892.1 (isoform c, SEQ ID NO: 33), which encodes the polypeptide having the amino acid sequence of NP_001307821.1 (isoform c, SEQ ID NO: 34); the mRNA sequence of NM_001320893.1 (isoform d, SEQ ID NO: 35) encoding the polypeptide having the amino acid sequence of NP_001307822.1 (isoform d, SEQ ID NO: 36); the mRNA sequence of NM_022552.4 (isoform a, SEQ ID NO: 37) encoding the polypeptide having the amino acid sequence of NP_072046.2 (isoform a, SEQ ID NO: 38); the mRNA sequence of NM_153759.3 (isoform b, SEQ ID NO: 39) encoding the polypeptide having the amino acid sequence of NP_715640.2 (isoform b, SEQ ID NO: 40); the mRNA sequence of NM_175629.2 (isoform a, SEQ ID NO: 41) encoding the polypeptide having the amino acid sequence of NP_783328.1 (isoform a, SEQ ID NO: 42); and the mRNA sequence of NM_175630.1 (isoform c2, SEQ ID NO: 43) encoding the polypeptide having the amino acid sequence of NP_783329.1 (isoform e, SEQ ID NO: 44); together with any additional naturally occurring allelic, splice variants, and processed forms thereof. Typically, as used herein, DNMT3A refers to human DNMT3A. Reference to specific sub-fragments or sub-sequences of DNMT3A can be identified in the application, e.g., by “nucleic acids 211-402 of DNMT3A of SEQ ID NO: 32.” Specific nucleic acid or amino acid residues of DNMT3A can be referred to as, for example, “A282 of DNMT3A of SEQ ID NO: 32” or A282 of SEQ ID NO: 32.”

[0223] “JAK2” or “janus kinase 2,” which is encoded on chromosome 9, is a protein tyrosine kinase involved in a specific subset of cytokine receptor signaling pathways. It has been found to be constitutively associated with the prolactin receptor and is required for responses to gamma interferon. Mice that do not express an active protein for this gene exhibit embryonic lethality associated with the absence of definitive erythropoiesis.

[0224] Accordingly, the term “JAK2” as used herein, refers to the genomic sequence of NG_009904.1 (SEQ ID NO: 45) encoding: the mRNA sequence of NM_001322194.1 (isoform a2, SEQ ID NO: 46), which encodes the polypeptide having the amino acid sequence of NP_001309123.1 (isoform a2, SEQ ID NO: 47); the mRNA sequence of NM_001322195.1 (isoform a3, SEQ ID NO: 48) encoding the polypeptide having the amino acid sequence of NP_001309124.1 (isoform a3, SEQ ID NO: 49); the mRNA sequence of NM_001322196.1 (isoform a4, SEQ ID NO: 50) encoding the polypeptide having the amino acid sequence of NP_001309125.1 (isoform a4, SEQ ID NO: 51); the mRNA sequence of NM_001322198.1 (isoform c, SEQ ID NO: 52) encoding the polypeptide having the amino acid sequence of NP_001309128.1 (isoform c, SEQ ID NO: 53); the mRNA sequence of NM_001322204.1 (isoform b, SEQ ID NO: 54) encoding the polypeptide having the amino acid sequence of NP_001309133.1 (isoform b, SEQ ID NO: 55); and the mRNA sequence of NM_004972.3 (isoform a1, SEQ ID NO: 56) encoding the polypeptide having the amino acid sequence of NP_004963.1 (isoform a1, SEQ ID NO: 57); together with any additional naturally occurring allelic, splice variants, and processed forms thereof. Typically, as used herein, JAK2 refers to human JAK2. Reference to specific sub-fragments or sub-sequences of JAK2 can be identified in the application, e.g., by “nucleic acids 211-402 of JAK2 of SEQ ID NO: 45.” Specific nucleic acid or amino acid residues of JAK2 can be referred to as, for example, “A282 of JAK2 of SEQ ID NO: 45” or A282 of SEQ ID NO: 45.”

[0225] “ASXL1” or “additional sex combs like transcriptional regulator 1,” which is encoded on chromosome 20, is similar to the Drosophila additional sex combs gene, which encodes a chromatin-binding protein required for normal determination of segment identity in the developing embryo. The protein is a member of the Polycomb group of proteins, which are necessary for the maintenance of stable repression of homeotic and other loci. The protein is thought to disrupt chromatin in localized areas, enhancing transcription of certain genes while repressing the transcription of other genes. The protein encoded by this gene functions as a ligand-dependent co-activator for retinoic acid receptor in cooperation with nuclear receptor coactivator 1. Mutations in this gene are associated with myelodysplastic syndromes and chronic myelomonocytic leukemia. Alternative splicing results in multiple transcript variants.

[0226] Accordingly, the term “ASXL1” as used herein, refers to the genomic sequence of NG_027868.1 (SEQ ID NO: 58) encoding: the mRNA sequence of NM_001164603.1 (isoform 2, SEQ ID NO: 59), which encodes the polypeptide having the amino acid sequence of NP_001158075.1 (isoform 2, SEQ ID NO: 60); and the mRNA sequence of NM_015338.5 (isoform 1, SEQ ID NO: 61) encoding the polypeptide having the amino acid sequence of NP_056153.2 (isoform 1, SEQ ID NO: 62); together with any additional naturally occurring allelic, splice variants, and processed forms thereof. Typically, as used herein, ASXL1 refers to human ASXL1. Reference to specific sub-fragments or sub-sequences of ASXL1 can be identified in the application, e.g., by “nucleic acids 211-402 of ASXL1 of SEQ ID NO: 56.” Specific nucleic acid or amino acid residues of ASXL1 can be referred to as, for example, “A282 of ASXL1 of SEQ ID NO: 56” or A282 of SEQ ID NO: 56.”

[0227] “PPM1D” or “protein phosphatase, Mg2+/Mn2+ dependent, 1D,” which is encoded on human chromosome 17, is a member of the PP2C family of Ser/Thr protein phosphatases. PP2C family members are known to be negative regulators of cell stress response pathways. The expression of this gene is induced in a p53-dependent manner in response to various environmental stresses. While being induced by tumor suppressor protein TP53/p53, this phosphatase negatively regulates the activity of p38 MAP kinase, MAPK/p38, through which it reduces the phosphorylation of p53, and in turn suppresses p53-mediated transcription and apoptosis. This phosphatase thus mediates a feedback regulation of p38-p53 signaling that contributes to growth inhibition and the suppression of stress induced apoptosis. This gene is located in a chromosomal region known to be amplified in breast cancer. The amplification of this gene has been detected in both breast cancer cell line and primary breast tumors, indicating a role of this gene in cancer development.

[0228] Accordingly, the term “PPM1D” as used herein, refers to the genomic sequence of NG_023265.1 (SEQ ID NO: 63) encoding: the mRNA sequence of NM_003620.3 (SEQ ID NO: 64), which encodes the polypeptide having the amino acid sequence of NP_003611.1 (SEQ ID NO: 65); together with any additional naturally occurring allelic, splice variants, and processed forms thereof. Typically, as used herein, PPM1D refers to human PPM1D. Reference to specific sub-fragments or sub-sequences of PPM1D can be identified in the application, e.g., by “nucleic acids 211-402 of PPM1D of SEQ ID NO: 56.” Specific nucleic acid or amino acid residues of PPM1D can be referred to as, for example, “A282 of PPM1D of SEQ ID NO: 56” or A282 of SEQ ID NO: 56.”

[0229] As described herein, somatic mutations or deficiencies in HSC cardiometabolic driver genes, such as TP53, JAK2, DNMT3A, ASXL1, and PPM1D/WIP1, in HSCs can lead to increased production of inflammatory cytokines, such as IL-1β, IL-6, and TNF, resulting in various signs and symptoms of cardiovascular disease and pathological remodeling. The studies described herein, using competitive bone marrow transplantation experiments in mice, demonstrate for the first time that selective expansion of HSCs lacking or having somatic mutations in a subset of genes, including TP53, JAK2, and DNMT3A, results in features consistent with heart failure phenotypes, including diminished cardiac function, increased cardiac hypertrophy, increased myocyte hypertrophy, and increased cardiac fibrosis. Accordingly, the studies described herein support a new paradigm of causal risk for cardiovascular diseases, metabolic diseases, and other inflammation-mediated diseases, whereby somatic mutations in HSCs, and consequent HSC clonal hematopoiesis, result in increased inflammatory cytokine production.

[0230] Hematopoietic stem cells (HSCs) and hematopoietic progenitor cells (HPCs) divide to produce blood cells by a continuous regeneration process. As the cells divide, they are prone to accumulating mutations, including deletions, insertions, and substitutions, that generally do not affect function. However, some mutations confer advantages in self-renewal, proliferation or both, resulting in clonal expansion of the cells comprising the mutations in question. The frequency of such somatic mutation events increases with age. The studies described herein demonstrate that preferential and progressive expansion of a subset of hematopoietic cells bearing somatic mutations in HSC cardiometabolic driver genes, such as TP53, JAK2, DNMT3A, ASXL1, and PPM1D/WIP1, leads to increased production of inflammatory cytokines, such as IL-1β, IL-6, and/or TNFα.

Compositions and Theranostic Methods for Treating IL-1β, IL-6, and/or TNFα-Mediated Proinflammatory Activity

[0231] As demonstrated herein, somatic mutations in HSC cardiometabolic driver genes, such as TP53, JAK2, DNMT3A, ASXL1, and/or PPM1D/WIP, causes selective expansion of hematopoietic cells leading to IL-1β (interleukin-1β), IL-6, and/or TNFα proinflammatory activity. Accordingly, provided herein are compositions, methods, and assays for modulating IL-1β (interleukin-1β), IL-6, and/or TNFα proinflammatory activity mediated by selective expansion of hematopoietic cells bearing somatic mutations in HSC cardiometabolic driver genes, such as TP53, JAK2, DNMT3A, ASXL1, and/or PPM 1D/WIP1.

[0232] Accordingly, in some aspects, provided herein are pharmaceutical compositions comprising an inhibitor of an HSC cardiometabolic driver gene-mediated proinflammatory activity and a pharmaceutically acceptable carrier for use in a subject having one or more somatic mutations in one or more HSC cardiometabolic driver genes in a sub-population of hematopoietic cells.

[0233] Also provided herein, in some aspects, are methods for treating a subject having, or at risk for, a HSC cardiometabolic driver gene-mediated proinflammatory disease comprising: administering a therapeutically effective amount of a pharmaceutical composition comprising an inhibitor of HSC cardiometabolic driver gene-mediated proinflammatory activity and a pharmaceutically acceptable carrier to a subject having one or more somatic mutations in one or more HSC cardiometabolic driver genes in a sub-population of hematopoietic cells.

[0234] A “somatic mutation,” as used herein, refers to a change in the genetic structure of a subject that is not inherited from a parent, and also not passed to offspring. Hence, a somatic mutation is a genetic change that occurs in any cell after the first cell division, wherein the mutation is replicated in all cells that descend from the mutated cell. The somatic cells that descend from the original mutated cell comprise a clonal variant within the body of the subject. Where these mutations are present in cells of somatic origin and not present in the germline, they are often called a somatic cell mutation or an acquired mutation. Somatic mutations will be present in only a subset of the cells contributing DNA to an analysis, since the mutant sequence will be present in fewer than 50% of the sequence reads arising from that genomic site. In other words, somatic mutations are identified as when a specific sequence is measured as occurring at a fraction of total sequences that deviates significantly from the frequency expected for the far-larger number of inherited variants—namely around 0%, around 50% or around 100%.

[0235] Somatic mutations can occur in a sub-population of cells for example, such as a sub-population of hematopoietic cells. Somatic mutations in HSC cardiometabolic driver genes, such as TP53, JAK2, DNMT3A, ASXL1, TET-2 and/or PPM1D/WIP12, relevant to the compositions and methods described herein include any nucleic acid or consequent amino acid somatic mutations in HSC cardiometabolic driver genes, such as TP53, JAK2, DNMT3A, ASXL1, and/or PPM1D/WIP1, found in a subset of hematopoietic cells, that lead to increased pro-inflammatory IL-1β signaling, increased pro-inflammatory IL-6 signaling, and/or increased pro-inflammatory TNFα signaling. Such increased pro-inflammatory IL-1β signaling, increased pro-inflammatory IL-6 signaling, and/or increased pro-inflammatory TNFα signaling includes, but is not limited to, increased IL-1β, IL-6, and/or TNFα transcription, increased NLRP3 inflammasome-mediated IL-1β secretion, increased IL-1-Receptor 1-mediated IL-1β signaling, increased IL-6-Receptor a-mediated IL-6 signaling, increased gp130-mediated IL-6 signaling, increased JAK1/JAK2-mediated IL-6 signaling, increased STAT3/STAT1-mediated IL-6 signaling, increased TNFR1-mediated TNFα signaling, increased TNFR2-mediated TNFα signaling, and/or increased TRAF2/TRAF3-mediated TNFα signaling. Such somatic mutations in HSC cardiometabolic driver genes, such as TP53, JAK2, DNMT3A, ASXL1, and/or PPM1D/WIP1, can be disruptive, in that they have an observed or predicted effect on protein function, or non-disruptive. As used herein, a “non-disruptive mutation” is typically a missense mutation, in which a codon is altered such that it codes for a different amino acid, but the encoded protein, i.e., TP53, JAK2, DNMT3A, ASXL1, and/or PPM1D/WIP1, is still expressed. Somatic mutations in HSC cardiometabolic driver r genes, such as TP53, JAK2, DNMT3A, ASXL1, and/or PPM1D/WIP1 include, for example, frameshift mutations, nonsense mutations, missense mutations or splice-site variant mutations, as those terms are known to those of ordinary skill in the art.

[0236] In some embodiments, one or more somatic mutations in an HSC cardiometabolic driver gene, such as TP53, JAK2, DNMT3A, ASXL1, and/or PPM1D/WIP1, in addition to leading to increased pro-inflammatory IL-1β, IL-6, and/or TNFα signaling, also results in clonal hematopoiesis. As used herein, “clonal hematopoiesis” refers to clonal outgrowth of a sub-population of hematopoietic cells having one or more somatic mutations in any of the HSC cardiometabolic driver genes described herein, including TP53, JAK2, DNMT3A, ASXL1, and/or PPM1D/WIP1. Somatic mutations in these genes relevant to the compositions and methods described herein can be found in, for example, WO 2016/085876, the contents of which are herein incorporated in their entireties by reference.

[0237] TP53 mutations relevant to the compositions and methods described herein include, but are not limited to, any nucleic acid mutations selected from a G743A mutation in SEQ ID NO:2 (also known as dbSNP 138 ID rs11540652 or R248Q) and a A659G mutation in SEQ ID NO: 2.

[0238] JAK2 mutations relevant to the compositions and methods described herein include, but are not limited to, a nucleic acid mutation G1849T in SEQ ID NO: 56 (also known as dbSNP 138 ID rs386626619 or a V617F mutation).

[0239] DNMT3A mutations relevant to the compositions and methods described herein include, but are not limited to, any nucleic acid mutations selected from: an A2723G mutation in SEQ ID NO: 37; a G2719A mutation in SEQ ID NO: 37; a T2714G mutation in SEQ ID NO: 37; a T2714A mutation in SEQ ID NO: 37; a C2711T mutation in SEQ ID NO: 37 (also known as dbSNP 138 ID rs3149095705); a C2695T mutation in SEQ ID NO: 37; a C2683A mutation in SEQ ID NO: 37; a C2678A mutation in SEQ ID NO: 37; a CC2671_2672G mutation in SEQ ID NO: 37; a G2669A mutation in SEQ ID NO: 37; a G2645C mutation in SEQ ID NO: 37 (also known as dbSNP 138 ID rs147001633); a G2645A mutation in SEQ ID NO: 37 (also known as dbSNP 138 ID rs147001633); a G2645C mutation in SEQ ID NO: 37 (also known as dbSNP 138 ID rs147001633); a C2644Tmutation in SEQ ID NO: 37 (also known as dbSNP 138 ID rs377577594); a A2638G mutation in SEQ ID NO: 37; a T2578C mutation in SEQ ID NO: 37 (also known as dbSNP 138 ID rs37301470); a A2554G mutation in SEQ ID NO: 37; a G2527A mutation in SEQ ID NO: 37; a 2479-2A>G mutation in SEQ ID NO: 37; a 2478+1G>T mutation in SEQ ID NO: 37; a 2479-2A>G mutation in SEQ ID NO: 37; a C2446T mutation in SEQ ID NO: 37; a 2408+1G>A mutation in SEQ ID NO: 37; a G2387T mutation in SEQ ID NO: 37; a T2383C mutation in SEQ ID NO: 37; a G2375A mutation in SEQ ID NO: 37; a T2339C mutation in SEQ ID NO: 37 (also known as dbSNP 138 ID rs370751539); a T2339C mutation in SEQ ID NO: 37; a C2330G mutation in SEQ ID NO: 37; a 2323-1G>A mutation in SEQ ID NO: 37; a 2305_2319C deletion mutation in SEQ ID NO: 37; a C2331T mutation in SEQ ID NO: 37; a C2309A mutation in SEQ ID NO: 37; a T2306A mutation in SEQ ID NO: 37; a 2296_2298C deletion mutation in SEQ ID NO: 37; A2281G mutation in SEQ ID NO: 37; a G2268T mutation in SEQ ID NO: 37; a T2264C mutation in SEQ ID NO: 37; a G2259C mutation in SEQ ID NO: 37; a T2252G mutation in SEQ ID NO: 37; a C2245T mutation in SEQ ID NO: 37; a G2207A mutation in SEQ ID NO: 37 (also known as dbSNP 138 ID rs139293773); a C2206T mutation in SEQ ID NO: 37; a A2204G mutation in SEQ ID NO: 37 (also known as dbSNP 138 ID rs147828672); a A2198G mutation in SEQ ID NO: 37; a 2195_2197G deletion mutation in SEQ ID NO: 37; a 2197_2197delinsTG mutation in SEQ ID NO: 37; a 2193_2196T deletion mutation in SEQ ID NO: 37; a C2195G deletion mutation in SEQ ID NO: 37; a C2185T mutation in SEQ ID NO: 37 (also known as dbSNP 138 ID rs20018028); a C2141G mutation in SEQ ID NO: 37 (also known as dbSNP 138 ID rs367909007); a T2128A mutation in SEQ ID NO: 37; a G2117A mutation in SEQ ID NO: 37; a 2115_2116G deletion mutation in SEQ ID NO: 37; a 2107_2108T deletion mutation in SEQ ID NO: 37; a G2104A mutation in SEQ ID NO: 37; a G2089T mutation in SEQ ID NO: 37; a 2086_2087A mutation in SEQ ID NO: 37; a 2082+1G>A mutation in SEQ ID NO: 37; a G2063A mutation in SEQ ID NO: 37 (also known as dbSNP 138 ID rs369713081); a G2054A mutation in SEQ ID NO: 37; a 2042_2043C mutation in SEQ ID NO: 37; a C2043G mutation in SEQ ID NO: 37; a T2042A mutation in SEQ ID NO: 37; a G2027T mutation in SEQ ID NO: 37; a 2000_2006C deletion mutation in SEQ ID NO: 37; a G1993T mutation in SEQ ID NO: 37; a G1984A mutation in SEQ ID NO: 37; a G1969A mutation in SEQ ID NO: 37 (also known as dbSNP 138 ID rs368961181); a T1964A mutation in SEQ ID NO: 37; a 1851+1G>T mutation in SEQ ID NO: 37; a G1846Tmutation in SEQ ID NO: 37; a 1840_1841A mutation in SEQ ID NO: 37; a C1837G mutation in SEQ ID NO: 37; a T1814C mutation in SEQ ID NO: 37; a G1811A mutation in SEQ ID NO: 37; a G1797T mutation in SEQ ID NO: 37; a C1792T mutation in SEQ ID NO: 37; a C1789T mutation in SEQ ID NO: 37; a 1736_1742G deletion mutation in SEQ ID NO: 37; a C1739G mutation in SEQ ID NO: 37; a C1706T mutation in SEQ ID NO: 37; a A1666G mutation in SEQ ID NO: 37; a G1648A mutation in SEQ ID NO: 37; a G1627T mutation in SEQ ID NO: 37; a 1592_1595G mutation in SEQ ID NO: 37; a A1586T mutation in SEQ ID NO: 37; a C1560A mutation in SEQ ID NO: 37; a 1554+2T>G mutation in SEQ ID NO: 37; a 1554+1G>A mutation in SEQ ID NO: 37; a 1538_1538delinsAT mutation in SEQ ID NO: 37; a A1502G mutation in SEQ ID NO: 37 (also known as dbSNP 138 ID rs149738328); a G1490A mutation in SEQ ID NO: 37; a 1474+1G>A mutation in SEQ ID NO: 37; a G1451A mutation in SEQ ID NO: 37; a T1441G mutation in SEQ ID NO: 37; a G1405Tmutation in SEQ ID NO: 37; a 1397_1398G mutation in SEQ ID NO: 37; a A1378G mutation in SEQ ID NO: 37; a C1358T mutation in SEQ ID NO: 37; a G1319A mutation in SEQ ID NO: 37; a T1316C mutation in SEQ ID NO: 37; a 1283_1284G mutation in SEQ ID NO: 37; a G1267C mutation in SEQ ID NO: 37; a C1154T mutation in SEQ ID NO: 37; a C1135T mutation in SEQ ID NO: 37; a 1123-2A>C mutation in SEQ ID NO: 37; a T1115C mutation in SEQ ID NO: 37; a G1114A mutation in SEQ ID NO: 37 (also known as dbSNP 138 ID rs371677904); a T1091C mutation in SEQ ID NO: 37; a G1055A mutation in SEQ ID NO: 37 (also known as dbSNP 138 ID rs139053291); a 1052_1054AA mutation in SEQ ID NO: 37; a T1031C mutation in SEQ ID NO: 37; a 1023_1023delins GTT mutation in SEQ ID NO: 37; a C1015_splice mutation in SEQ ID NO: 37; a G995A mutation in SEQ ID NO: 37; a G994A mutation in SEQ ID NO: 37; a G990A mutation in SEQ ID NO: 37; a G976T mutation in SEQ ID NO: 37; a C958T mutation in SEQ ID NO: 37; a G942A mutation in SEQ ID NO: 37; a C920T mutation in SEQ ID NO: 37; a C920G mutation in SEQ ID NO: 37; a G918A mutation in SEQ ID NO: 37; a G886A mutation in SEQ ID NO: 37; a C883G mutation in SEQ ID NO: 37; a T875C mutation in SEQ ID NO: 37; a 737_737 delinsGC mutation in SEQ ID NO: 37; and a 696_697C mutation in SEQ ID NO: 37;

[0240] In some embodiments of the compositions and methods described herein, the one or more DNMT3A somatic mutations are selected from a T1115C mutation in SEQ ID NO: 37; a C2711T mutation in SEQ ID NO: 37 (also known as dbSNP 138 ID rs3149095705); a C1837G mutation in SEQ ID NO: 37; a A1666G mutation in SEQ ID NO: 37; a C1789T mutation in SEQ ID NO: 37; a G2719A mutation in SEQ ID NO: 37; a G1627T mutation in SEQ ID NO: 37; an A2723G mutation in SEQ ID NO: 37; a G1797T mutation in SEQ ID NO: 37; a T2252G mutation in SEQ ID NO: 37; a C1560A mutation in SEQ ID NO: 37; a T1031C mutation in SEQ ID NO: 37; a G2645A mutation in SEQ ID NO: 37 (also known as dbSNP 138 ID rs147001633); a C2043G mutation in SEQ ID NO: 37; a C2446T mutation in SEQ ID NO: 37; a A2198G mutation in SEQ ID NO: 37; A2281G mutation in SEQ ID NO: 37; a C920G mutation in SEQ ID NO: 37; a A2204G mutation in SEQ ID NO: 37 (also known as dbSNP 138 ID rs147828672); and a frameshift mutation in DNMT3A.

[0241] ASXL1 mutations relevant to the compositions and methods described herein include but are not limited to, any nucleic acid mutations selected from: a 920_921C mutation in SEQ ID NO: 61; a T1157A mutation in SEQ ID NO: 61; a C1294T mutation in SEQ ID NO: 61; a 1541_1543C mutation in SEQ ID NO: 61; a C1564T mutation in SEQ ID NO: 61; a 1621_1621delinsCGGCT mutation in SEQ ID NO: 61; a 1926_1926delinsAG mutation in SEQ ID NO: 61; a 1771_1771delinsTA mutation in SEQ ID NO: 61; a 1887_1910T deletion mutation in SEQ ID NO: 61; a 1899_1901T deletion mutation in SEQ ID NO: 61; a 1970_1970delinsAG mutation in SEQ ID NO: 61; a 2057_2059A mutation in SEQ ID NO: 61; a C2077T mutation in SEQ ID NO: 61; a 2109_2110T mutation in SEQ ID NO: 61; a 2109_2109delinsTC mutation in SEQ ID NO: 61; a A2173T mutation in SEQ ID NO: 61; a 2193_2194A mutation in SEQ ID NO: 61; a 2383_2384T mutation in SEQ ID NO: 61; a C2407T mutation in SEQ ID NO: 61; a 2466_2467A mutation in SEQ ID NO: 61; a G2476T mutation in SEQ ID NO: 61; a 2530_2530delinsAC mutation in SEQ ID NO: 61; a C2568A mutation in SEQ ID NO: 61; a G2694A mutation in SEQ ID NO: 61; a C2893T mutation in SEQ ID NO: 61; a 2958_2958delinsCGT mutation in SEQ ID NO: 61; a C3202T mutation in SEQ ID NO: 61; a 3758_3758delinsGC mutation in SEQ ID NO: 61; and a 4542_4544C mutation in SEQ ID NO: 61.

[0242] In some embodiments of the compositions and methods described herein, the one or more ASXL1 somatic mutations are selected from a C2407T mutation in SEQ ID NO: 61; a C2893T mutation in SEQ ID NO: 61; a 1926_1926delinsAG mutation in SEQ ID NO: 61; and a frameshift mutation in ASXL1.

[0243] PPM1D mutations relevant to the compositions and methods described herein include but are not limited to, any nucleic acid mutations selected from: a 346_346delinsGC mutation in SEQ ID NO: 64; a 883_885G mutation in SEQ ID NO: 64; a T1221A mutation in SEQ ID NO: 64; a 346_346delinsGC mutation in SEQ ID NO: 64; a 1279_1280T mutation in SEQ ID NO: 64; a C1372T mutation in SEQ ID NO: 64; a 1412_1413C mutation in SEQ ID NO: 64; a 1430_1431A mutation in SEQ ID NO: 64; a 1437_1437delinsTA mutation in SEQ ID NO: 64; a 1448_1448delinsCT mutation in SEQ ID NO: 64; a 1465_1466T mutation in SEQ ID NO: 64; a 1528_1528delinsCA mutation in SEQ ID NO: 64; a G1573T mutation in SEQ ID NO: 64; a G1618T mutation in SEQ ID NO: 64; and a C1714T mutation in SEQ ID NO: 64.

[0244] In some embodiments of the compositions and methods described herein, the one or more PPM1D somatic mutations are selected from a G1618T mutation in SEQ ID NO: 64; a C1372T mutation in SEQ ID NO: 64; and a frameshift mutation in PPM1D.

[0245] In some embodiments of the compositions and methods described herein, a subject also has a somatic mutation in TET2. Methylcytosine dioxygenase TET2” or “TET2” is a member of the family of TET proteins, which have been shown to be responsible for conversion of 5-methylcytosine (5mC) to 5-hydroxymethylcytosine (5hmC), as well as function in embryonic stem cell regulation, myelopoiesis, and zygote development (Dawlaty et al., 2011; Gu et al., 2011; Iqbal et al., 2011; Ito et al., 2010; Ko et al., 2010; Koh et al., 2011; Wossidlo et al., 2011). TET2 is a dioxygenase that catalyzes the conversion of the modified genomic base 5-methylcytosine (5mC) into 5-hydroxymethylcytosine (5hmC) and plays a key role in active DNA demethylation. TET2 has a preference for 5-hydroxymethylcytosine in CpG motifs, and has also been shown to mediate subsequent conversion of 5hmC into 5-formylcytosine (5fC), and conversion of 5fC to 5-carboxylcytosine (5caC). Methylation at the C5 position of cytosine bases is an epigenetic modification of the mammalian genome which plays an important role in transcriptional regulation. In addition to its role in DNA demethylation, TET2 has also been shown to be involved in the recruitment of the O-GlcNAc transferase OGT to CpG-rich transcription start sites of active genes, thereby promoting histone H2B GlcNAcylation by OGT. Similarly, TET2 has been reported to recruit histone deacetylases (HDACs) to specific gene promoters, contributing to histone deacetylation and gene repression (Zhang et al 2015).

[0246] Accordingly, the terms “TET2” or “TET-2,” as used herein, refers to the genomic sequence of NG_028191.1 (SEQ ID NO: 66) encoding: the mRNA sequence of NM_001127208.2 (isoform 1, SEQ ID NO: 67), which encodes the 2002 amino acid polypeptide having the amino acid sequence of NP_001120680.1 (isoform 1, SEQ ID NO: 68); the mRNA sequence of NM_017628.4 (isoform 2, SEQ ID NO: 69) encoding the 1165 amino acid polypeptide having the amino acid sequence of NP_060098.3 (isoform 2, SEQ ID NO: 70); together with any additional naturally occurring allelic, splice variants, and processed forms thereof. Typically, TET2 refers to human TET2. Reference to specific sub-fragments or sub-sequences of TET2 can be identified in the application, e.g., by “nucleic acids 211-402 of TET2.” Specific nucleic acid or amino acid residues of TET2 can be referred to as, for example, “S282 of TET2” or “S282 of SEQ ID NO: 68.”

[0247] Accordingly, TET2 mutations relevant to the compositions and methods described herein include any nucleic acid mutations in the genomic sequence of TET2 of SEQ ID NO: 66 leading to: an S460F mutation in SEQ ID NO: 68; a D666G mutation in SEQ ID NO: 68; a P941S mutation in SEQ ID NO: 68; a C1135Y missense mutation in SEQ ID NO: 68; a R73 frameshift insertion mutation in SEQ ID NO: 68, a Y85 frameshift deletion mutation in SEQ ID NO: 68; a S123 frameshift deletion mutation in SEQ ID NO: 68, an E170 frameshift deletion mutation in SEQ ID NO: 68; a D162 frameshift deletion mutation in SEQ ID NO: 68; an 1181 frameshift deletion mutation in SEQ ID NO: 68; a T221 frameshift insertion mutation in SEQ ID NO: 68; an L260 frameshift deletion mutation in SEQ ID NO: 68; an 1274 frameshift deletion mutation in SEQ ID NO: 68, a L311 frameshift insertion mutation in SEQ ID NO: 68; a Q341 nonsense mutation in SEQ ID NO: 68; a Q383 nonsense mutation in SEQ ID NO: 68; a S423 nonsense mutation in SEQ ID NO: 68, a L427 frameshift insertion mutation in SEQ ID NO: 68, a S420 frameshift deletion mutation in SEQ ID NO: 68; a S424 frameshift deletion mutation in SEQ ID NO: 68; a S462 frameshift deletion mutation in SEQ ID NO: 68; an 1472 frameshift deletion mutation in SEQ ID NO: 68; a Q481 nonsense mutation in SEQ ID NO: 68; a T518 frameshift insertion mutation in SEQ ID NO: 68; a S530 nonsense mutation in SEQ ID NO: 68; a S543 frameshift deletion mutation in SEQ ID NO: 68; a Q530 nonsense mutation in SEQ ID NO: 68; a L532 frameshift deletion mutation in SEQ ID NO: 68; a L532 nonsense mutation in SEQ ID NO: 68; a R544 nonsense mutation in SEQ ID NO: 68; a W585 nonsense mutation in SEQ ID NO: 68; a Q595 frameshift deletion mutation in SEQ ID NO: 68; a L579 frameshift insertion mutation in SEQ ID NO: 68; a S588 nonsense mutation in SEQ ID NO: 68; a G634 frameshift deletion mutation in SEQ ID NO: 68; a Q656 frameshift deletion mutation in SEQ ID NO: 68; a P690 frameshift deletion mutation in SEQ ID NO: 68; a R686 frameshift deletion mutation in SEQ ID NO: 68, an E692 frameshift insertion mutation in SEQ ID NO: 68; a Q705 nonsense mutation in SEQ ID NO: 68, a F713frameshift deletion mutation in SEQ ID NO: 68; a Q734 nonsense mutation in SEQ ID NO: 68, a S757 nonsense mutation in SEQ ID NO: 68; a L759 frameshift deletion mutation in SEQ ID NO: 68, a Q764 frameshift deletion mutation in SEQ ID NO: 68; a 1771 frameshift deletion mutation in SEQ ID NO: 68; a Q779 nonsense mutation in SEQ ID NO: 68; an H783 frameshift insertion mutation in SEQ ID NO: 68, a Q770 nonsense mutation in SEQ ID NO: 68, a E819 frameshift deletion mutation in SEQ ID NO: 68, a H839 frameshift deletion mutation in SEQ ID NO: 68; a K858 frameshift deletion mutation in SEQ ID NO: 68; a Q886 nonsense mutation in SEQ ID NO: 68; a L878 frameshift deletion mutation in SEQ ID NO: 68; an M906 frameshift insertion mutation in SEQ ID NO: 68; a Q909 nonsense mutation in SEQ ID NO: 68; a Q910 nonsense mutation in SEQ ID NO: 68; a Q912 frameshift deletion mutation in SEQ ID NO: 68; a Q937 nonsense mutation in SEQ ID NO: 68; a Q916 nonsense mutation in SEQ ID NO: 68; a P989 frameshift insertion mutation in SEQ ID NO: 68; an A1014 frameshift insertion mutation in SEQ ID NO: 68, a Q1042 nonsense mutation in SEQ ID NO: 68, a Q1030 nonsense mutation in SEQ ID NO: 68, an H1064 frameshift insertion mutation in SEQ ID NO: 68; a T1078 frameshift deletion mutation in SEQ ID NO: 68; a T1107 frameshift deletion mutation in SEQ ID NO: 68; a N1103frameshift deletion mutation in SEQ ID NO: 68; a T1114 frameshift deletion mutation in SEQ ID NO: 68; a Q1127 frameshift insertion mutation in SEQ ID NO: 68; an S282F mutation in SEQ ID NO: 68; a N312S mutation in SEQ ID NO: 68; an L346P mutation in SEQ ID NO: 68; and an G to A splice site mutation at position 106158509 of SEQ ID NO: 1.

[0248] In some embodiments of the compositions and methods described herein, the one or more TET2 somatic mutations are selected from an S282F mutation in SEQ ID NO: 68, an N312S mutation in SEQ ID NO: 68, an L346P mutation in SEQ ID NO: 68, an S460F mutation in SEQ ID NO: 68, a D666G mutation in SEQ ID NO: 68, a P941S mutation in SEQ ID NO: 68, and a C1135Y mutation in SEQ ID NO: 68.

[0249] The compositions and methods described herein require, in some embodiments, sequencing of at least part of the genome in a sample comprising hematopoietic cells, including, for example, an enriched for population of myeloid cells, obtained from a subject. Sequencing can be carried out according to any suitable technique, many of which are generally known in the art. Many proprietary sequencing systems are available commercially and can be used in the context of the methods described herein, such as for example from Illumina, USA. Single-cell sequencing methods are known in the art, as noted for example by Eberwine et al., Nature Methods 11, 25-27 (2014) doi:10.1038/nmeth.2769 Published online 30 Dec. 2013; and single-cell sequencing in microfluidic droplets (Nature 510, 363-369 (2014) doi: 10.1038/nature13437).

[0250] Sequencing of DNA can be performed on tissues or cells. Sequencing of specific cell types (for example, hematopoietic cells obtained by flow sorting or myeloid lineage hematopoietic cells) can identify mutations in specific cell types that provide specific predictive value for use with the compositions and methods described herein. Sequencing can also be conducted in single cells, using appropriate single-cell sequencing strategies. Single-cell analyses can be used to identify high-risk combinations of mutations co-occurring in the same cells. Co-occurrence signifies that the mutations are occurring in the same cell clone and carry a greater risk, and therefore have a greater predictive value, than occurrence of the same mutations in different individual cells, for example. Certain sequences, such as those with high GC content, repetitive elements and/or low sequence complexity are prone to sequencing errors and false positive creation due to artifacts caused by enzyme slippage and other reading errors. Hence, care must be taken to ensure that any sequence changes observed in these regions are real and not artifact.

[0251] Sequencing can be of specific genes only, specific parts of the genome, or the whole genome. Where specific genes are sequenced, the gene(s) sequences are preferably selected from the group consisting of TP53, JAK2, DNMT3A, ASXL1, and/or PPM1D/WIP1. In some embodiments, TET2 sequencing is also performed. In some embodiments, specific parts of genes can be sequenced. For example, for DNMT3A, exons 7 to 23 can be sequenced. In some embodiments, specific mutations can be interrogated, such as the JAK2 mutation V617F. Additionally, or alternatively, specific mutations can be avoided.

[0252] Where a part of a genome is sequenced, that part can be the exome. The exome is the part of the genome formed by exons, and thus an exon sequencing method sequences the expressed sequences in the genome. There are 180,000 exons in the human genome, which constitute about 1% of the genome, or approximately 30 million base pairs. Exome sequencing requires enrichment of sequencing targets for exome sequences; several techniques can be used, including PCR, molecular inversion probes, hybrid capture of targets, and solution capture of targets. Sequencing of targets can be conducted by any suitable technique.

[0253] Due to enrichment bias in exome libraries, allelic fractions for inherited heterozygous mutations are not expected to be centered around 50%. The average expected allelic fraction for the alternate allele of a heterozygous single nucleotide polymorphisms (SNPs) is approximately 470%-4%. For indels, this value is even lower, likely due to a mix of enrichment bias, sequence misalignment, and improper reporting of allelic counts. Therefore, depending on the exome library used, different thresholds are applied for SNPs and indels for the purpose of identifying putative somatic mutations.

[0254] In some embodiments of the aspects described herein, the analysis of the genomes of single cells by single cell sequencing can be used to provide information about the relationship between mutations and cell types. For example, the presence of a mutation in multiple cells of a defined cell type can further strengthen the conclusion that the mutation is clonal. Moreover, the presence of more than one mutation in a single cell can be evidence of clonal expansion, if the mutations are repeatedly found together.

[0255] The inhibitors of IL-1β, IL-6, and/or TNFα-mediated proinflammatory activity are particularly useful for subjects having one or more somatic mutations in an HSC cardiometabolic driver gene in a population of hematopoietic cells. As used herein, an “inhibitor of an HSC cardiometabolic driver gene mutation-mediated proinflammatory activity” refers to any agent or molecule that significantly blocks, inhibits, reduces, or interferes with the downstream effects of somatic mutations in an HSC cardiovascular driver gene that leads to increased IL-1β, IL-6, and/or TNFα proinflammatory activity or signaling in vitro, in situ, and/or in vivo. Such increased pro-inflammatory IL-1β signaling, increased pro-inflammatory IL-6 signaling, and/or increased pro-inflammatory TNFα signaling includes, but is not limited to, increased IL-1j, IL-6, and/or TNFα transcription, increased NLRP3 inflammasome-mediated IL-1β secretion, increased IL-1-Receptor 1-mediated IL-1β signaling, increased IL-6-Receptor a-mediated IL-6 signaling, increased gp130-mediated IL-6 signaling, increased JAK1/JAK2-mediated IL-6 signaling, increased STAT3/STAT1-mediated IL-6 signaling, increased TNFR1-mediated TNFα signaling, increased TNFR2-mediated TNFα signaling, and/or increased TRAF2/TRAF3-mediated TNFα signaling. Exemplary inhibitors of HSC cardiometabolic driver gene-mediated proinflammatory activity contemplated for use in the various aspects and embodiments described herein include, but are not limited to, antibodies or antigen-binding fragments thereof that specifically bind to IL-1β, IL-6, and/or TNFα, and/or antibodies or antigen-binding fragments thereof that specifically bind to their receptors, such as IL1R1, IL-6-Receptor a, gp130, TNFR1, or TNFR2, thereby inhibiting/reducing/blocking IL-1β, IL-6, and/or TNFα, interaction(s) with their receptors; small molecule agents that target or specifically bind IL-1β, IL-6, and/or TNFα, and/or IL-1β, IL-6, and/or TNFα signaling components, such as caspase-1, STAT3/STAT1, JAK1/JAK2, and TRAF2/TRAF3, and inhibit/reduce/block IL-1β, IL-6, and/or TNFα-mediated proinflammatory activity; RNA or DNA aptamers that bind to IL-1β, IL-6, and/or TNFα or any of their receptors and inhibit/reduce/block IL-1β, IL-6, and/or TNFα-mediated proinflammatory activity; and/or receptor fragments or fusion polypeptides thereof that block endogenous IL-1f, IL-6, and/or TNFα interactions with their endogenous receptors.

[0256] In regard to NLRP3 inflammasome-mediated IL-1β secretion, and inhibitors thereof for use as inhibitors of HSC cardiovascular driver gene mutation-mediated IL-1β (interleukin-1β) proinflammatory activity, as described herein, as known to those of skill in the art, the NLRP3 inflammasome is present primarily in immune and inflammatory cells following activation by inflammatory stimuli; these cells include macrophages, monocytes, DCs, and splenic neutrophils. Activation of the NLRP3 inflammasome occurs in two steps. The first step involves a priming or initiating signal, in which many PAMPs or DAMPs are recognized by TLRs, leading to activation of nuclear factor kappa B (NF-κB)-mediated signaling, which in turn up-regulates transcription of inflammasome-related components, including inactive NLRP3, proIL-1β, and prolL-18 (Bauernfeind et al., 2009; Franchi et al., 2012, 2014). The second step of inflammasome activation is the oligomerization of NLRP3 and subsequent assembly of NLRP3, ASC, and procaspase-1 into a complex. This triggers the transformation of procaspase-1 to caspase-1, as well as the production and secretion of mature IL-1β and IL-18 (Kim et al., 2015; Ozaki et al., 2015; Rabeony et al., 2015). An inhibitor of HSC cardiovascular driver gene mutation-mediated IL-1β (interleukin-1β) proinflammatory activity useful in the methods and compositions described herein can thus target any of the steps and/or components leading to NLRP3 inflammasome activation (see, for example, non-limiting examples in B-Z Shao et al., NLRP3 inflammasome and its inhibitors: a review; Front Pharmacol. 2015; 6: 262).

[0257] A non-limiting example of a NLRP3 inflammasome inhibitor useful in the methods and compositions described herein, includes: MCC950 (Selleckchem). MCC950 is a small molecule inhibitor of canonical and noncanonical activation of the NLRP3 inflammasome. MCC950 inhibits accelerated atherosclerosis and inhibits the accelerated pathological cardiac remodeling mediated by hematopoietic TET2 mutations (Fuster J J et al., Science. 2017 Feb. 24; 355(6327):842-847, Sano, S et al., J Am Coll Cardiol. 2018 Feb. 27; 71(8):875-886). In some embodiments of any of the aspects, the NLRP3 inflammasome inhibitor or inflammasome inhibitor is MCC950.

[0258] The inhibitors of HSC cardiometabolic driver gene mutation-mediated proinflammatory activity described herein result in a significant inhibition or reduction or decrease in any of the pathways leading to IL-1β, IL-6, and/or TNFα mediated proinflammatory activity or signaling, such as IL-1β, IL-6, and/or TNFα transcription, IL-1β, IL-6, and/or TNFα translation, NLRP3 inflammasome-mediated IL-1β secretion, and/or IL-6, and/or TNFα binding to their respective receptors and consequent signaling. As used herein, the terms reduce(s)/reduced/reducing/reduction, inhibit(s)/inhibiting/inhibited or decrease(s)/decreasing/decreased generally means either a reduction or inhibition of at least 5%, at least 10%, at least 25%, at least 50%, at least 60%, at least 70%, at least 80%, at least 90%, at least 95%, at least 98%, or more, compared to the level of IL-1β, IL-6, and/or TNFα transcription, IL-1β, IL-6, and/or TNFα translation, NLRP3 inflammasome-mediated IL-1β secretion, and/or IL-1β, IL-6, and/or TNFα binding to their respective receptors, and consequent receptor I (IL-1R1)-mediated IL-1β, IL-6, and/or TNFα signaling, under the same conditions but without the presence of inhibitors of HSC cardiometabolic driver gene mutation-mediated proinflammatory activity described herein. Assays for measuring such inhibition or reduced interactions are known in the art and are described herein in the Examples.

[0259] A disease or medical condition is considered to be mediated by “IL-1β (interleukin-1β proinflammatory activity” if the spontaneous or experimental disease or medical condition is associated with, or mediated by, for example, elevated levels of IL-1β in bodily fluids or tissue, or if cells or tissues taken from the body produce elevated levels of IL-1 in culture. In many cases, such diseases mediated by IL-1β proinflammatory activity are also recognized by the following additional two conditions: (1) pathological findings associated with the disease or medical condition can be mimicked experimentally in animals by the administration of IL-1β; and (2) the pathology induced in experimental animal models of the disease or medical condition can be inhibited or abolished by treatment with agents which inhibit the action of IL-1β. A non-limiting list of disorders and diseases known to be mediated by or exacerbated by aberrant, elevated IL-1β activity include hereditary syndromes with mutations in inflammasome-associated genes, such as cryopyrin-associated periodic syndromes (CAPS), Familial Mediterranean fever, Pyogenic arthritis, pyoderma gangrenosum and acne (PAPA) syndrome, Deficiency of IL-1Ra (DIRA); Crystal-induced arthropathies, such as gout; systemic-onset juvenile arthritis or Still disease; adult-onset Still disease; rheumatoid arthritis; osteoarthritis; Schnitzler syndrome; Behçet disease; Crohn's disease; periodontal diseases; COPD (Chronic Obstructive Pulmonary Disease); and neutrophil-triggered skin diseases, such as pyoderma gangrenosum, psoriasis pustulosa, Sweet syndrome; and chronic kidney disorders.

[0260] A disease or medical condition is considered to be mediated by “IL-6 (interleukin-6) proinflammatory activity” if the spontaneous or experimental disease or medical condition is associated with, or mediated by, for example, elevated levels of IL-6 in bodily fluids or tissue, or if cells or tissues taken from the body produce elevated levels of IL-6 in culture. In many cases, such diseases mediated by IL-6 proinflammatory activity are also recognized by the following additional two conditions: (1) pathological findings associated with the disease or medical condition can be mimicked experimentally in animals by the administration of IL-6; and (2) the pathology induced in experimental animal models of the disease or medical condition can be inhibited or abolished by treatment with agents which inhibit the action of IL-6. A non-limiting list of disorders and diseases known to be mediated by or exacerbated by aberrant, elevated IL-6 activity include cardiac myxoma, rheumatoid arthritis, Castleman's disease, systemic lupus erythematosus, systemic sclerosis, inflammatory myopathies, Diabetes mellitus (type 2), obesity, Graves' ophthalmopathy, Polymyalgia rheumatic, Giant-cell arteritis, Steroid refractory acute GVHD, Non-ST elevation myocardial infarction, Noninfectious uveitis, JIA-associated uveitis, Recurrent ovarian cancer, Behcet's syndrome, Schizophrenia, Erdheim-Chester disease, Primary Sjogren's syndrome, and fibrous dysplasia of bone.

[0261] A disease or medical condition is considered to be mediated by “TNFα (Tumor Necrosis Factor α) proinflammatory activity” if the spontaneous or experimental disease or medical condition is associated with, or mediated by, for example, elevated levels of TNFα in bodily fluids or tissue, or if cells or tissues taken from the body produce elevated levels of TNFα in culture. In many cases, such diseases mediated by TNFα proinflammatory activity are also recognized by the following additional two conditions: (1) pathological findings associated with the disease or medical condition can be mimicked experimentally in animals by the administration of TNFα; and (2) the pathology induced in experimental animal models of the disease or medical condition can be inhibited or abolished by treatment with agents which inhibit the action of TNFα. A non-limiting list of disorders and diseases known to be mediated by or exacerbated by aberrant, elevated TNF (activity include rheumatoid arthritis, inflammatory bowel disease, psoriasis, psoriatic arthritis, ankylosing spondylitis, axial spondyloarthropathies, Crohn's disease, ulcerative colitis, juvenile idiopathic arthritis (JIA), acute cardav

[0262] In some embodiments of the compositions and methods described herein, a disease mediated by IL-1β proinflammatory activity, IL-6 proinflammatory activity, and/or TNFα proinflammatory activity is a cardiometabolic disease. Cardiometabolic diseases include cardiovascular diseases, as well as those disorders that complicate the risk and clinical management of cardiovascular conditions by potentiating and/or exacerbating hypertension, hyperlipidemia, atherosclerosis and cardiomyopathy, and include insulin resistance, hyperglycemia, obesity, type 2 diabetes mellitus, metabolic syndrome, hyperlipidemia and oxidative stress.

[0263] As used herein, the phrase “cardiovascular condition, disease or disorder” is intended to include all disorders characterized by insufficient, undesired or abnormal blood vessel or cardiac function, e.g. hypertension, ischemic heart disease, hypertensive heart disease and pulmonary hypertensive heart disease, valvular disease, cardiac arrhythmia, vascular disease, myocardial infarction, congestive heart failure, myocarditis, atherosclerosis, restenosis, and any condition which leads to congestive heart failure in a subject, particularly a human subject. Insufficient or abnormal cardiac function can be the result of disease, injury and/or aging. The term “myocardial ischemia” refers to circulatory disturbances caused by coronary atherosclerosis and/or inadequate oxygen supply to the myocardium. For example, an acute myocardial infarction represents an irreversible ischemic insult to myocardial tissue. This insult results in an occlusive (e.g., thrombotic or embolic) event in the coronary circulation and produces an environment in which the myocardial metabolic demands exceed the supply of oxygen to the myocardial tissue.

[0264] In some embodiments of the compositions and methods described herein, a disease mediated by IL-1β proinflammatory activity, IL-6 proinflammatory activity, and/or TNFα proinflammatory activity is a chronic kidney disease.

[0265] In regard to the methods of treating chronic kidney disease mediated by IL-1β proinflammatory activity, IL-6 proinflammatory activity, and/or TNFα proinflammatory activity, the term “chronic kidney disease” or CKD refers to renal diseases that slowly and progressively worsen over time due to the progressive loss of nephrons and consequent loss of renal function. In the early stages, there may be no symptoms. The loss of function usually takes months or years to occur. It may be so slow that symptoms do not appear until kidney function is less than one-tenth of normal. The final stage of chronic kidney disease is called end-stage renal disease (ESRD). At this stage, the kidneys are no longer able to remove enough wastes and excess fluids from the body. The patient needs dialysis or a kidney transplant. Diabetes, which leads to diabetic nephropathy, and high blood pressure are the two most common causes of chronic kidney disease and account for most cases. Other diseases and conditions that can damage the kidneys and lead to chronic kidney disease, include, but are not limited to: autoimmune disorders (such as systemic lupus erythematosus and scleroderma); birth defects of the kidneys (such as polycystic kidney disease); certain toxic chemicals; glomerulonephritis; injury or trauma; kidney stones and infection; problems with the arteries leading to or inside the kidneys; some pain medications and other drugs (such as cancer drugs); reflux nephropathy (in which the kidneys are damaged by the backward flow of urine into the kidneys); etc. As used herein, “proteinuria” refers to the presence of an excess of serum proteins in the urine. Proteinuria can, in some embodiments, be indicative of kidney disease, but, by itself, is not conclusive. In some embodiments of these aspects and all such aspects described herein, a subject having or at risk for a chronic kidney disease has diabetic nephropathy.

[0266] In some embodiments of the aspects descried herein, an inhibitor of HSC cardiometabolic driver gene mutation-mediated proinflammatory activity is an IL-1β inhibitory compound. As used herein, an “IL-1β inhibitory compound” or “IL-1β inhibitor” or “inhibitor of IL-1β” refers to a compound or agent capable of specifically inhibiting or specifically preventing activation of cellular receptors to IL-1β and consequent downstream effects of IL-1β signaling. Classes of interleukin-1β inhibitors include: interleukin-1 receptor antagonists such as IL-1ra; anti-IL-1 receptor antibodies (e.g., EP 623674), the contents of which is hereby incorporated by reference in its entirety; IL-1 binding proteins such as soluble IL-1 receptors (e.g., U.S. Pat. Nos. 5,492,888, 5,488,032, and 5,464,937, 5,319,071, and 5,180,812, the contents of which are hereby incorporated by reference in their entireties); anti-IL-1β monoclonal antibodies (e.g., WO 9501997, WO 9402627, WO 9006371, U.S. Pat. No. 4,935,343, EP 364778, EP 267611 and EP 220063, the contents of which are hereby incorporated by reference in their entireties); IL-1 receptor I accessory proteins (e.g., WO 96/23067, the disclosure of which is hereby incorporated by reference), and other compounds and proteins which block in vivo synthesis, including in vivo transcription, in vivo translation, and/or extracellular release of IL-1β.

[0267] In some embodiments of the aspects described herein, the inhibitor of HSC cardiometabolic driver gene mutation-mediated proinflammatory activity is selected from any of the IL-1β or inflammasome inhibitors listed in Table 1.

TABLE 1
Exemplary List of IL-1β inhibitors for use as HSC cardiometabolic driver
gene mutation-mediated IL-1β (interleukin-1β) proinflammatory activity.

| | Active | Molecule | | Mode of | Route of | Product |
|---|---|---|---|---|---|---|
| Product Name | Ingredient | Type | Target | Action | Administration | Description |
| ABT981 | — | Large | Interleukin 1A | Interleukin- | Subcutaneous | ABT981 is a dual |
| | | molecule- | (IL1A), | 1alpha | | variable |
| | | Antibody | Interleukin 1B | (IL-1alpha) | | immunoglobulin |
| | | | (IL1B) | Inhibitor, | | (DVD-Ig) |
| | | | | Interleukin- | | consisting of |
| | | | | 1beta | | interleukin 1, beta |
| | | | | (IL-1beta) | | antibody and |
| | | | | Inhibitor | | interleukin 1, alpha |
| | | | | | | antibody. It binds |
| | | | | | | and inhibits the |
| | | | | | | interleukin-1 alpha, |
| | | | | | | beta (IL-1 a/β). |
| AC201 | diacerein | Small | Caspase, | Caspase-1 | Oral, Topical | AC201 contains |
| Also known as AC | | molecule | Apoptosis- | Inhibitor, | | diacerein as an |
| 201, AC 203, | | | Related | Interleukin- | | active ingredient. |
| AC203 | | | Cysteine | 1beta | | Diacerein is a small |
| | | | Peptidase | (IL-1beta) | | molecule which |
| | | | 1 (CASP1), | Inhibitor | | inhibits the |
| | | | Interleukin 1B | | | production and |
| | | | (IL1B) | | | activity of caspase- |
| | | | | | | 1 and the cytokine |
| | | | | | | interleukin-1beta |
| | | | | | | (IL-1Beta), and |
| | | | | | | down-regulate IL- |
| | | | | | | 1Beta receptors. |
| | | | | | | AC201 reduces the |
| | | | | | | HbA1c/blood sugar |
| | | | | | | levels. |
| Anti-interleukin-1 | | Large | Interleukin 1B | Interleukin- | | Anti-interleukin-1 |
| Beta antibody by | | molecule- | (IL1B) | 1beta | | Beta antibody is a |
| ABZYME | | Antibody | | (IL-1beta) | | targeted human |
| | | | | Inhibitor | | monoclonal |
| | | | | | | antibody. |
| APX002 | interleukin 1, | Large | Interleukin 1B | Interleukin- | | APX002 is a |
| Also known as | beta | molecule- | (IL1B) | 1beta | | humanized |
| APX 002, TK 002, | monoclonal | Antibody | | (IL-1beta) | | monoclonal |
| TK002 | antibody | | | Inhibitor | | antibody which |
| | (humanized) | | | | | inhibits |
| | | | | | | interleukin- |
| | | | | | | 1-beta. |
| Canakinumab/Ilaris | canakinumab | Large | Interleukin 1B | Interleukin- | Subcutaneous | Canakinumab is an |
| Also known as IL 1 | | molecule- | (IL1B) | 1beta | | interleukin 1 beta |
| Beta Mab | | Antibody | | (IL-1beta) | | monoclonal |
| NOVARTIS, IL 1 | | | | Inhibitor | | antibody derived |
| Beta Monoclonal | | | | | | from a mouse |
| Antibody | | | | | | monoclonal |
| NOVARTIS, | | | | | | antibody (mAb) |
| Interleukin 1 Beta | | | | | | acting against IL-1 |
| Monoclonal | | | | | | beta. |
| Antibody | | | | | | |
| NOVARTIS | | | | | | |
| CDP48 | interleukin 1, | Large | Interleukin 1 | Interleukin- | Subcutaneous | CDP484 is a |
| Also known as | beta antibody | molecule- | Receptor, | 1 Beta | | PEGylated antibody |
| CDP 484 | (pegylated) | Antibody | Type II | (IL-1 Beta) | | fragment targeting |
| | | | (IL1R2) | Receptor | | pro-inflammatory |
| | | | | Antagonist | | cytokine interleukin |
| | | | | | | 1-beta. |
| CP412245 | | Small | Interleukin 1 | Interleukin- | | CP412245 is a |
| Also known as CP | | molecule | Receptor, | 1 Beta | | potent inhibitor of |
| 412, 245, CP | | | Type II | (IL-1 Beta) | | stimulus-coupled |
| 412245, | | | (IL1R2) | Receptor | | IL-1beta post- |
| CP412, 245 | | | | Antagonist | | translational |
| | | | | | | processing. It is a |
| | | | | | | diarylsulfonylurea |
| | | | | | | compound that |
| | | | | | | blocks formation of |
| | | | | | | mature IL-1 without |
| | | | | | | increasing the |
| | | | | | | amount of |
| | | | | | | procytokine that is |
| | | | | | | released |
| | | | | | | extracellularly. |
| CYT013 IL1bQb, | | | Interleukin 1 | Interleukin- | Subcutaneous | CYT013IL1bQb is |
| interleukin 1 beta | | | Receptor, | 1 Beta | | a therapeutic |
| Also known as | | | Type II | (IL-1 Beta) | | vaccine consisting |
| interleukin 1 | | | (IL1R2) | Receptor | | of modified |
| receptor antagonist | | | | Antagonist | | interleukin-1 beta |
| protein | | | | | | molecules coupled |
| | | | | | | to the virus-like |
| | | | | | | particle Qb. The |
| | | | | | | vaccine induces |
| | | | | | | antibodies |
| | | | | | | production against |
| | | | | | | IL-1 beta to |
| | | | | | | decrease |
| | | | | | | inflammation and |
| | | | | | | reduce disease |
| | | | | | | progression. |
| MCC 950 or | | Small | | | | NLRP3 |
| MCC950/CRID3/ | | molecule | | | | inflammasome |
| CP-456773 | | | | | | inhibitor. Blocking |
| | | | | | | apoptosis- |
| | | | | | | associated speck- |
| | | | | | | like protein (ASC) |
| | | | | | | oligomerization, |
| | | | | | | Inhibiting of |
| | | | | | | canonical and non- |
| | | | | | | canonical NLRP3 |
| | | | | | | inflammasome. |
| immunereszumab | interleukin 1, | Large | Interleukin 1B | | | Targeted against |
| | beta antibody | molecule- | (IL1B) | | | interleukin-1 beta. |
| | | Antibody | | | | |
| Inflabion | diacerein | Small | Interleukin 1 | Interleukin-1 | Oral | Inflabion contains |
| | | molecule | (IL1) | (IL-1) | | diacerein as an |
| | | | | Inhibitor | | active ingredient. |
| | | | | | | Diacerin (diacerein) |
| | | | | | | is an anthraquinone |
| | | | | | | derivative that acts |
| | | | | | | via inhibition of |
| | | | | | | interleukin-1beta. |
| Inflammasome | | Small | Interleukin 1B | Interleukin- | | Inflammasome |
| modulator | | molecule | (IL1B) | 1beta | | modulator interferes |
| OPSONA | | | | (IL-1beta) | | with inflammasome |
| | | | | Inhibitor | | mediated release of |
| | | | | | | interleukin (IL)- |
| | | | | | | 1beta. It is a |
| | | | | | | specific IL1-β |
| | | | | | | inhibitor. |
| LY2189102 | interleukin 1, | Large | Interleukin 1 | Interleukin-1 | Intravenous, | LY2189102 |
| Also known as LY | beta | molecule- | Receptor, | Beta | Subcutaneous | contains interleukin |
| 2189102 | monoclonal | Antibody | Type II | (IL-1 Beta) | | 1, beta monoclonal |
| | antibody | | (IL1R2) | Receptor | | antibody as an |
| | (humanized) | | | Antagonist | | active ingredient. It |
| | | | | | | is targeted against |
| | | | | | | interleukin-1 beta. |
| MEDI8968 | interleukin 1 | Large | Interleukin 1A | Interleukin-1 | Subcutaneous | MEDI8968 is a |
| Also known as | receptor | molecule- | (IL1A), | alpha | | fully human IgG2 |
| MEDI 8968 | monoclonal | Antibody | Interleukin 1B | (IL-1 alpha) | | monoclonal |
| | antibody | | (IL1B) | Inhibitor, | | antibody (mAb) |
| | (human) | | | Interleukin- | | that binds |
| | | | | 1beta | | selectively to |
| | | | | (IL-1beta) | | Interleukin-1 |
| | | | | Inhibitor | | Receptor I (IL-1R1) |
| | | | | | | to inhibit the |
| | | | | | | binding of IL-1 |
| | | | | | | alpha and IL-1 beta. |
| PGE3935199 | | | Caspase, | Caspase-1 | Oral | PGE3935199 is a |
| Also known as | | | Apoptosis- | Inhibitor | | caspase-1 inhibitor. |
| PGE 3935199 | | | Related | | | Interleukin-1β |
| | | | Cysteine | | | converting enzyme |
| | | | Peptidase 1 | | | (Caspase-1, ICE) is |
| | | | (CASP1) | | | involved in the |
| | | | | | | processing of Pro- |
| | | | | | | IL-1β to the active |
| | | | | | | cytokine IL-1β. |
| PGE527667 | | | Caspase, | Caspase-1 | Oral | PGE527667 is a |
| Also known as | | | Apoptosis- | Inhibitor | | Caspase-1 inhibitor. |
| PGE 527667 | | | Related | | | Interleukin-1β |
| | | | Cysteine | | | converting enzyme |
| | | | Peptidase 1 | | | (Caspase-1, ICE) is |
| | | | (CASP1) | | | involved in the |
| | | | | | | processing of Pro- |
| | | | | | | IL-1β to the active |
| | | | | | | cytokine IL-1β. |
| TRK530 | | | Interleukin 1B | Interleukin- | Oral | TRK530 is an |
| Also known as | | | (IL1B) | 1beta | | immunomodulatory |
| TRK530 | | | | (IL-1beta) | | bisphosphonate |
| | | | | Inhibitor | | derivative that is |
| | | | | | | directed against |
| | | | | | | interleukin 1b. |
| XL 130 | | Large | Interleukin 1 | Interleukin-1 | | XL130 contains |
| Also known as | | molecule | Receptor | (IL-1) | | PASylated |
| interleukin 1 | | | (IL1R) | Receptor | | interleukin 1 |
| receptor antagonist | | | | Antagonist | | receptor antagonist |
| protein (pasylated) | | | | | | protein as an active |
| | | | | | | ingredient. |
| | | | | | | Interleukin 1 |
| | | | | | | receptor antagonist |
| | | | | | | protein acts by |
| | | | | | | preventing the |
| | | | | | | interaction of IL-1 |
| | | | | | | with the receptor. |
| XOMA052 | gevokizumab | Large | Interleukin 1B | Interleukin- | Intravenous, | XOMA052 contains |
| Also known as S | | molecule- | (IL1B) | 1beta | Subcutaneous | gevokizumab as an |
| 78989, S78989, | | Antibody | | (IL-1beta) | | active ingredient. |
| XMA005.2, | | | | Inhibitor | | Gevokizumab is a |
| XOMA 052 | | | | | | humanized |
| | | | | | | monoclonal |
| | | | | | | antibody directed |
| | | | | | | against interleukin |
| | | | | | | 1b. |
| AMG108 | interleukin 1 | Large | Interleukin 1 | Interleukin-1 | Subcutaneous | AMG108 is a fully |
| Also known as | receptor | molecule- | (IL1) | (IL-1) | | human interleukin 1 |
| AMG 108 | monoclonal | Antibody | | Inhibitor | | receptor |
| | antibody | | | | | monoclonal |
| | (human) | | | | | antibody that binds |
| | | | | | | to and inhibits the |
| | | | | | | action of |
| | | | | | | interleukin-1 (IL-1). |
| HL 2351, IL1Ra | | | Interleukin 1 | Interleukin-1 | Subcutaneous | HL2351 is a long |
| hyFc | | | (IL1) | (IL-1) | | acting fusion |
| | | | | Inhibitor | | protein of IL-1Ra |
| | | | | | | and hybrid fc |
| | | | | | | fragment (hyFc) |
| | | | | | | which inhibits |
| | | | | | | interleukin-1. |
| IL1Hy1 | | | Interleukin 1 | Interleukin-1 | | IL1Hy1 is an |
| Also known as IL | | | Receptor | (IL-1) | | interleukin-1 |
| 1F5, IL 1Hy1, | | | (IL1R) | Receptor | | receptor antagonist |
| interleukin 1 | | | | Antagonist | | that acts by |
| family, member 5, | | | | | | blocking the |
| interleukin 1 HY1 | | | | | | binding of |
| | | | | | | interleukin-1 (IL-1) |
| | | | | | | to cell receptors. |
| Interleukin 1 ra | | Large | Interleukin 1 | Interleukin-1 | | Recombinant |
| AXXO | | molecule | Receptor | (IL-1) | | human interleukin 1 |
| Also known as | | | (IL1R) | Receptor | | receptor antagonist |
| interleukin 1 | | | | Antagonist | | protein acts by |
| receptor antagonist | | | | | | preventing the |
| protein | | | | | | interaction of IL-1 |
| (recombinant, | | | | | | with the receptor. |
| human) | | | | | | |
| Orthokine | | | Interleukin 1 | Interleukin-1 | Intra-articular | Orthokine is an |
| Also known as | | | Receptor | (IL-1) | | autologous serum |
| interleukin 1 | | | (IL1R) | Receptor | | solution derived |
| receptor antagonist | | | | Antagonist | | from the patient's |
| protein | | | | | | blood. It contains |
| | | | | | | the interleukin-1 |
| | | | | | | receptor antagonist |
| | | | | | | (IL-1Ra) protein |
| | | | | | | that prevents the |
| | | | | | | interaction of IL-1 |
| | | | | | | with the receptor. |
| PRT 1000 | | | Interleukin 1 | Interleukin-1 | | PRT1000 contains |
| Also known as | | | Receptor | (IL-1) | | MB-IL1RA which |
| interleukin 1 | | | (IL1R) | Receptor | | is an interleukin-1 |
| receptor antagonist | | | | Antagonist | | receptor antagonist |
| protein | | | | | | protein (IL1RA), |
| | | | | | | fused with a matrix |
| | | | | | | binding domain. It |
| | | | | | | is a potent cytokine |
| | | | | | | inhibitor and |
| | | | | | | prevents the |
| | | | | | | interaction of IL1 |
| | | | | | | with the receptor. |
| Anakinra/Kineret | | Large | Interleukin 1 | Interleukin-1 | | interleukin 1 (IL1) |
| | | molecule | Receptor | (IL-1) | | receptor antagonist. |
| | | | (IL1R) | Receptor | | |
| | | | | Antagonist | | |
| Rilonacept | | Large | | | | Rilonacept has one |
| | | molecule | | | | extracellular |
| | | | | | | domain of IL-1 |
| | | | | | | receptor type 1 (IL- |
| | | | | | | 1R1) and one of IL- |
| | | | | | | 1 receptor accessory |
| | | | | | | protein (IL-1RAcP) |
| | | | | | | bound to the Fc |
| | | | | | | portion of IgG |
| β-hydroxybutyrate | | Small | | | | Blocking ASC |
| (BHB) | | molecule | | | | oligomerization, |
| | | NLRP3 | | | | Inhibiting |
| | | inhibitor | | | | K+/potassium |
| | | | | | | efflux; |
| MicroRNA-223 | | Micro | | | | Suppressing |
| | | RNA | | | | NLRP3 protein |
| | | | | | | expression by |
| | | | | | | binding to a |
| | | | | | | conserved site in |
| | | | | | | the3′ UTR of the |
| | | | | | | NLRP3 transcript,. |

[0268] In some embodiments of the aspects described herein, the IL-1β inhibitor is an IL-1β inhibitor antibody or antigen-binding fragment thereof that binds to IL-1β and reduces/inhibits/prevents IL-1β binding to its receptor(s), thereby inhibiting IL-1β-mediated pro-inflammatory activity. As used herein, “antibodies” or “antigen-binding fragments” thereof include monoclonal, human, humanized or chimeric antibodies, single chain antibodies, Fab fragments, F(ab′) fragments, fragments produced by a Fab expression library, and/or binding fragments of any of the above. Antibodies also refer to immunoglobulin molecules and immunologically active portions of immunoglobulin molecules, i.e., molecules that contain antigen or target binding sites or “antigen-binding fragments.” The immunoglobulin molecules described herein can be of any type (e.g., IgG, IgE, IgM, IgD, IgA and IgY), class (e.g., IgG1, IgG2, IgG3, IgG4, IgA1 and IgA2) or subclass of immunoglobulin molecule, as is understood by one of skill in the art.

[0269] Accordingly, in some embodiments of the aspects described herein, the IL-1 inhibitor antibody or antigen-binding fragment thereof is selected from ABT981, an anti-interleukin-10 inhibitor antibody by ABZYME, APX002, Canakinumab/Ilaris, CDP48, immunereszumab, LY2189102, MEDI8968, and XOMA052.

[0270] In some embodiments of the aspects described herein, the IL-1β inhibitor is an IL-1 receptor antagonist. As used herein, an “interleukin-1 receptor antagonist” (“IL-1ra”) is any agent or molecule, including small molecules and antibody or antigen-binding fragments thereof, that binds to an interleukin-1 receptor thereby preventing binding of IL-1β to the receptor and thereby inhibiting IL-1β-mediated pro-inflammatory activity. Interleukin 1 receptor antagonists, as well as methods of making and using thereof, are described in, for example, U.S. Pat. No. 5,075,222; WO 91/08285; WO 91/17184; AU 9173636; WO 92/16221; WO93/21946; WO 94/06457; WO 94/21275; FR 2706772; WO 94/21235; DE 4219626, WO 94/20517; WO 96/22793 and WO 97/28828, the contents of which are incorporated herein by reference in their entireties. The proteins include glycosylated as well as non-glycosylated IL-1 receptor antagonists.

[0271] Accordingly, in some embodiments of the aspects described herein, the IL-1 receptor antagonist is selected from CDP484, CP412245, CYT013 IL1bQb, XL 130, AMG108, HL 2351, IL1Hyl, AXXO, orthokine, PRT 1000, anakinra, and rilonacept.

[0272] In some embodiments of the aspects described herein, the IL-1β inhibitor is a small molecule or microRNA inhibitor that inhibits IL-1β-mediated pro-inflammatory activity. Such small molecule inhibitors can target or specifically bind IL-1β, IL-1-receptors, and/or IL-1 signaling components, such as caspase-1, and/or the NLRP3 inflammasome, or components thereof, thereby inhibiting/reducing/blocking IL-1β-mediated proinflammatory activity. As used herein, “small molecule inhibitors” include, but are not limited to, small peptides or peptide-like molecules, soluble peptides, and synthetic non-peptidyl organic or inorganic compounds. A small molecule inhibitor or antagonist can have a molecular weight of any of about 100 to about 20,000 daltons (Da), about 500 to about 15,000 Da, about 1000 to about 10,000 Da.

[0273] Accordingly, in some embodiments of the aspects described herein, the small molecule or microRNA IL-1β inhibitor is selected from, AC201, MCC950 or CRID3, inflabion, inflammasome modulator OPSONA, PGE3935199, PGE527667, TRK530, β-hydroxybutyrate (BHB), and microRNA-223. In some embodiments of the aspects described herein, the small molecule IL-1β inhibitor is MCC950.

[0274] In some embodiments of the aspects described herein, an inhibitor of HSC cardiometabolic driver gene mutation-mediated proinflammatory activity is an IL-6 inhibitor. As used herein, “IL-6 inhibitor” refers to a therapeutic agent that inhibits IL-6 directly or indirectly (for example, via the IL-6 receptor(s), or via inhibiting JAK-STAT signaling).

[0275] In some embodiments of the aspects described herein, the IL-6 inhibitor is an IL-6 inhibitor antibody or antigen-binding fragment thereof that binds to IL-6 and reduces/inhibits/prevents IL-6 binding to its receptor(s), thereby inhibiting IL-6-mediated pro-inflammatory activity. As used herein, “antibodies” or “antigen-binding fragments” thereof include monoclonal, human, humanized or chimeric antibodies, single chain antibodies, Fab fragments, F(ab′) fragments, fragments produced by a Fab expression library, and/or binding fragments of any of the above. Antibodies also refer to immunoglobulin molecules and immunologically active portions of immunoglobulin molecules, i.e., molecules that contain antigen or target binding sites or “antigen-binding fragments.” The immunoglobulin molecules described herein can be of any type (e.g., IgG, IgE, IgM, IgD, IgA and IgY), class (e.g., IgG1, IgG2, IgG3, IgG4, IgA1 and IgA2) or subclass of immunoglobulin molecule, as is understood by one of skill in the art.

[0276] Accordingly, in some embodiments of the aspects described herein, the IL-6 inhibitor antibody or antigen-binding fragment thereof is selected from Siltuximab, Olokizumab, Elsilimomab, mAb 1339, Sirukumab, Clazakizumab (formerly ALD518 and BMS-945429), ARGX-109, FM101, and C326.

[0277] In some embodiments of the aspects described herein, the IL-6 inhibitor is an IL-6 receptor antagonist. As used herein, an “IL-6 receptor antagonist” (“IL-6ra”) is any agent or molecule, including small molecules and antibody or antigen-binding fragments thereof, that binds to an IL-6 receptor thereby preventing binding of IL-6 to the receptor and thereby inhibiting IL-6-mediated pro-inflammatory activity.

[0278] Accordingly, in some embodiments of the aspects described herein, the IL-6 receptor antagonist is selected from tocilizumab (also known as atlizumab), sarilumab, REGN88, FE301, and LMT-28.

[0279] In some embodiments of the aspects described herein, the IL-6 inhibitor is a small molecule or microRNA inhibitor that inhibits IL-6-mediated pro-inflammatory activity. Such small molecule inhibitors can target or specifically bind IL-6, IL-6-receptors, and/or IL-6 signaling components, such as JAK or STAT molecules, or components thereof, thereby inhibiting/reducing/blocking IL-6-mediated proinflammatory activity. As used herein, “small molecule inhibitors” include, but are not limited to, small peptides or peptide-like molecules, soluble peptides, and synthetic non-peptidyl organic or inorganic compounds. A small molecule inhibitor or antagonist can have a molecular weight of any of about 100 to about 20,000 daltons (Da), about 500 to about 15,000 Da, about 1000 to about 10,000 Da.

[0280] In some embodiments of the aspects described herein, a small molecule IL-6 inhibitor is ALX-0061 or LMT-28.

[0281] In some embodiments of the aspects described herein, an IL-6 inhibitor is a JAK-STAT inhibitor. As used herein, “JAK-STAT” inhibitors refer to agents that inhibit the activity of one or more of the Janus kinase family of enzymes (JAK1, JAK2, JAK3, TYK2), thereby interfering with the JAK-STAT signaling pathway. Examples of JAK-STAT inhibitors include, but are not limited to baricitinib, decernotinid, filgotinib, INCB-039110, ruxolitinib, tofacitinib, Oclacitinib, Gandotinib (LY-2784544), Lestaurtinib (CEP-701), Momelotinib (GS-0387, CYT-387), Pacritinib (SB1518), PF-04965842, Upadacitinib (ABT-494), and Peficitinib (ASP015K, JNJ-54781532).

[0282] In some embodiments of the aspects described herein, an inhibitor of HSC cardiometabolic driver gene mutation-mediated proinflammatory activity is a TNFα or TNF-α inhibitor. As used herein, “TNFα inhibitor” refers to a therapeutic agent that inhibits TNFα directly or indirectly (for example, via the TNFα receptor(s), or via inhibiting TRAF2/TRAF3 signaling).

[0283] In some embodiments of the aspects described herein, the TNFα inhibitor is an TNFα inhibitor antibody or antigen-binding fragment thereof that binds to TNFα and reduces/inhibits/prevents TNFα binding to its receptor(s), thereby inhibiting TNFα-mediated pro-inflammatory activity. As used herein, “antibodies” or “antigen-binding fragments” thereof include monoclonal, human, humanized or chimeric antibodies, single chain antibodies, Fab fragments, F(ab′) fragments, fragments produced by a Fab expression library, and/or binding fragments of any of the above. Antibodies also refer to immunoglobulin molecules and immunologically active portions of immunoglobulin molecules, i.e., molecules that contain antigen or target binding sites or “antigen-binding fragments.” The immunoglobulin molecules described herein can be of any type (e.g., IgG, IgE, IgM, IgD, IgA and IgY), class (e.g., IgG1, IgG2, IgG3, IgG4, IgA1 and IgA2) or subclass of immunoglobulin molecule, as is understood by one of skill in the art.

[0284] Accordingly, in some embodiments of the aspects described herein, the TNFα inhibitor antibody or antigen-binding fragment thereof is selected from adalimumab (HUMIRA), Adalimumab-atto (Amjevita), certolizumab pegol, golimumab, infliximab,

[0285] In some embodiments of the aspects described herein, the TNFα inhibitor is a TNFα receptor antagonist. As used herein, an “TNFα receptor antagonist” (“TNFαra”) is any agent or molecule, including small molecules and antibody or antigen-binding fragments thereof, that binds to a TNFα receptor thereby preventing binding of TNFα to the receptor and thereby inhibiting TNFα-mediated pro-inflammatory activity.

[0286] Accordingly, in some embodiments of the aspects described herein, the TNFα receptor antagonist is etanercept.

[0287] In some embodiments of the aspects described herein, the TNFα inhibitor is a small molecule or microRNA inhibitor that inhibits TNFα-mediated pro-inflammatory activity. Such small molecule inhibitors can target or specifically bind TNFα, TNFα-receptors, and/or TNFα signaling components, such as TRAF2/TRAF3 molecules, or components thereof, thereby inhibiting/reducing/blocking TNFα-mediated proinflammatory activity. As used herein, “small molecule inhibitors” include, but are not limited to, small peptides or peptide-like molecules, soluble peptides, and synthetic non-peptidyl organic or inorganic compounds. A small molecule inhibitor or antagonist can have a molecular weight of any of about 100 to about 20,000 daltons (Da), about 500 to about 15,000 Da, about 1000 to about 10,000 Da.

[0288] In some embodiments of the aspects described herein, a TNFα inhibitor is a TRAF2/TRAF3 inhibitor. As used herein, “TRAF2/TRAF3” inhibitors refer to agents that inhibit the activity of one or more of the TNF receptor associated family (TRAF) of enzymes (JAK1, JAK2, JAK3, TYK2), thereby interfering with the JAK-STAT signaling pathway.

[0289] In some embodiments of the aspects descried herein, an inhibitor of inhibitor of HSC cardiometabolic driver gene mutation-mediated proinflammatory activity is a HSC cardiometabolic driver gene activating compound or HSC cardiometabolic driver gene potentiatior. As used herein, the terms “HSC cardiometabolic driver gene activating compound” or “HSC cardiometabolic driver gene potentiatior” or “HSC cardiometabolic driver gene activator” or “HSC cardiometabolic driver gene agonist” refer to a molecule or agent that mimics or up-regulates (e.g., increases, potentiates or supplements) the biological activity of a HSC cardiometabolic driver gene, such as TP53, JAK2, DNMT3A, ASXL1, and/or PPM1D/WIP1, thereby decreasing or inhibiting proinflammatory activity caused by deficient HSC cardiometabolic driver gene activity. A HSC cardiometabolic driver gene potentiator or agonist can be, in some embodiments, a protein fragment or derivative encoded by a HSC cardiometabolic driver gene thereof having at least one bioactivity of the wild-type protein encoded by the HSC cardiometabolic driver gene. Exemplary HSC cardiometabolic driver gene activating compounds or agonists contemplated for use in the various aspects and embodiments described herein include, but are not limited to, RNA or DNA aptamers; structural analogs or fragments, derivatives, or fusion polypeptides thereof of the protein encoded by the HSC cardiometabolic driver gene; and small molecule agents that target or bind to HSC cardiometabolic driver gene products and act as functional mimics.

[0290] A subject in need of the pharmaceutical compositions and methods comprising compositions comprising inhibitors of HSC cardiometabolic driver gene mutation-mediated proinflammatory activity and a pharmaceutically acceptable carrier described herein has or is identified as having one or more somatic mutations in an HSC cardiometabolic driver genes in a sub-population of their hematopoietic cells. As used herein, a “sub-population” of hematopoietic cells comprising the one or more mutations in HSC cardiometabolic driver genes in the subject refers to at least 1% of hematopoietic cells, at least 2% of hematopoietic cells, at least 3% of hematopoietic cells, at least 4% of hematopoietic cells, at least 5% of hematopoietic cells, at least 6% of hematopoietic cells, at least 7% of hematopoietic cells, at least 8% of hematopoietic cells, at least 9% of hematopoietic cells, at least 10% of hematopoietic cells, at least 11% of hematopoietic cells, at least 12% of hematopoietic cells, at least 13% of hematopoietic cells, at least 15% of hematopoietic cells, at least 15% of hematopoietic cells, at least 20% of hematopoietic cells, or more, or between 1-5% of hematopoietic cells, between 1-10% of hematopoietic cells, between 1-15% of hematopoietic cells, between 1-20% of hematopoietic cells, between 5-10% of hematopoietic cells, between 5-15% of hematopoietic cells, between 5-20% of hematopoietic cells, between 10-15% of hematopoietic cells, between 10-20% of hematopoietic cells, between 15-20% of hematopoietic cells, present in a sample obtained from the subject. In some embodiments, a sub-population of cells in a subject can refer to a specific cell type or lineage within the hematopoietic cells in the subject, such as myeloid lineage cells or macrophages. In such embodiments, the “sub-population” of cells comprising the one or more mutations in an HSC cardiometabolic driver gene in the subject refers to at least 1% of myeloid cells, at least 2% of myeloid cells, at least 3% of myeloid cells, at least 4% of myeloid cells, at least 5% of myeloid cells, at least 6% of myeloid cells, at least 7% of myeloid cells, at least 8% of myeloid cells, at least 9% of myeloid cells, at least 10% of myeloid cells, at least 11% of myeloid cells, at least 12% of myeloid cells, at least 13% of myeloid cells, at least 15% of myeloid cells, at least 15% of myeloidcells, at least 20% of myeloidcells, or more, or between 1-5% of myeloid cells, between 1-10% of myeloid cells, between 1-15% of myeloid cells, between 1-20% of myeloid cells, between 5-10% of myeloid cells, between 5-15% of myeloid cells, between 5-20% of myeloid cells, between 10-15% of myeloid cells, between 10-20% of myeloid cells, between 15-20% of myeloid cells, or greater than 20% of myeloid cells present in a sample obtained from the subject.

[0291] The terms “biological sample” or “sample” as used herein refers to a cell or population of cells or a quantity of tissue or fluid from a subject comprising one or more hematopoietic cells. Most often, the biological sample has been removed from a subject, but the term “biological sample” can also refer to cells or tissue analyzed in vivo, i.e., without removal from the subject. Thus, a “sample” of hematopoietic cells can be obtained from any tissue or organ in the subject comprising cells of hematopoietic origin, including blood, spleen, lymph nodes, cord blood, placenta, and bone marrow. Hematopoietic cells (HSCs) include myeloid cells (monocytes and macrophages, neutrophils, basophils, eosinophils, erythrocytes, megakaryocytes/platelets, dendritic cells), and lymphoid lineages (T-cells, B-cells, NKT-cells, NK-cells), as well as progenitor cell populations, including multipotent cells, such as hematopoietic stem cells. As used herein, the term “population of hematopoietic cells” encompasses a heterogeneous or homogeneous population of hematopoietic cells and/or hematopoietic progenitor cells. In other words, a population of hematopoietic cells comprising at least two different cell types is referred to herein as a “heterogeneous population.”

[0292] In some aspects, provided herein are sensitive and specific companion diagnostic and treatment methods, also referred to herein as “theranostic methods,” to detect and closely monitor mutations in HSC cardiometabolic driver genes associated with disease, particularly IL-1β, IL-6, and/or TNFα mediated disorders, including cardiometabolic diseases. As used herein, a “companion diagnostic” refers to a diagnostic method and or reagent that are used to identify subjects susceptible to treatment with a particular treatment or to monitor treatment and/or to identify an effective dosage for a subject or sub-group or other group of subjects.

[0293] Accordingly, in some aspects, provided herein are methods for detecting a subject having, or at risk for, a cardiometabolic driver gene mutation-mediated proinflammatory disease comprising: (a) obtaining a hematopoietic cell sample from a subject, and (b) sequencing the hematopoietic cell sample from the subject to detect one or more somatic mutations in one or more HSC cardiometabolic driver genes in the hematopoietic cell sample.

[0294] In some aspects, provided herein are theranostic methods for treating a subject having, or at risk for, a HSC cardiometabolic driver gene mutation-mediated proinflammatory disease comprising: (a) sequencing a hematopoietic cell sample from the subject to identify one or more somatic mutations in one or more HSC cardiometabolic driver genes, and (b) administering a therapeutically effective amount of a pharmaceutical composition comprising an inhibitor of HSC cardiometabolic driver gene mutation-mediated proinflammatory activity and a pharmaceutically acceptable carrier if one or more somatic mutations in an HSC cardiometabolic driver gene are identified in the hematopoietic cell sample.

[0295] A sample of hematopoietic cells for use in the methods and uses described herein can, in some embodiments, undergo further processing, such as via flow cytometric sorting and/or magnetic bead based sorting methods, to become an enriched population of hematopoietic cells for analysis of HSC cardiometabolic driver gene mutations, using any method known to one of skill in the art.

[0296] In some embodiments of the aspects described herein, a sample comprising hematopoietic cells isolated from a subject, such as a sample obtained from peripheral blood, is then further processed, for example, by cell sorting (e.g., magnetic sorting or FACS), to obtain a population of enriched or isolated hematopoietic cells or a sub-population thereof, for example, myeloid-derived cells.

[0297] The terms “isolate” and “methods of isolation,” as used herein, refer to any process whereby a cell or population of cells, such as a population of hematopoietic cells, is removed from a subject or sample in which it was originally found, or a descendant of such a cell or cells. The term “isolated population,” as used herein, refers to a population of cells that has been removed and separated from a biological sample, or a mixed or heterogeneous population of cells found in such a sample. Such a mixed population includes, for example, a population of hematopoietic cells obtained from peripheral blood. In some embodiments, an isolated population is a substantially pure population of cells as compared to the heterogeneous population from which the cells were isolated or enriched from. In some embodiments of this aspect and all such aspects described herein, the isolated population is an isolated population of myeloid cells. In other embodiments of this aspect and all aspects described herein, the isolated population comprises a substantially pure population of myeloid cells as compared to a heterogeneous population of hematopoietic cells comprising various other cells types.

[0298] The term “substantially pure,” with respect to a particular cell population, refers to a population of cells that is at least about 75%, at least about 80%, at least about 85%, at least about 90%, at least about 95%, at least about 98%, or at least about 99% pure, with respect to the cells making up a total cell population.

[0299] The terms “enriching” or “enriched” are used interchangeably herein and mean that the yield (fraction) of cells of one type, such as hematopoietic cells for use in the methods and uses described herein, is increased by at least 15%, by at least 20%, by at least 25%, by at least 30%, by at least 35%, by at least 40%, by at least 45%, by at least 50%, by at least 55%, by at least 60%, by at least 65%, by at least 70%, or by at least 75%, over the fraction of cells of that type in the starting biological sample, culture, or preparation.

[0300] In some embodiments of the aspects described herein, markers specific for different hematopoietic cell types are used to isolate or enrich for these cells. A “marker,” as used herein, describes the characteristics and/or phenotype of a cell. Markers can be used for selection of cells comprising characteristics of interest. Markers will vary with specific cells. Markers are characteristics, whether morphological, functional or biochemical (enzymatic), particular to a cell type, or molecules expressed by the cell type. Preferably, such markers are proteins, and more preferably, possess an epitope for antibodies or other binding molecules available in the art. However, a marker may consist of any molecule found in a cell including, but not limited to, proteins (peptides and polypeptides), lipids, polysaccharides, nucleic acids and steroids. Examples of morphological characteristics or traits include, but are not limited to, shape, size, appearance (e.g., smooth, translucent), and nuclear to cytoplasmic ratio. Examples of functional characteristics or traits include, but are not limited to, the ability to adhere to particular substrates, ability to incorporate or exclude particular dyes, ability to migrate under particular conditions, and the ability to differentiate along particular lineages. Markers may be detected by any method available to one of skill in the art.

[0301] Accordingly, as used herein, a “cell-surface marker” refers to any molecule that is expressed on the surface of a cell. Cell-surface expression usually requires that a molecule possesses a transmembrane domain. Some molecules that are normally not found on the cell-surface can be engineered by recombinant techniques to be expressed on the surface of a cell. Many naturally occurring cell-surface markers are termed “CD” or “cluster of differentiation” molecules. Cell-surface markers often provide antigenic determinants to which antibodies can bind to.

[0302] A cell can be designated “positive” or “negative” for any cell-surface marker, and both such designations are useful for the practice of the methods described herein. A cell is considered “positive” for a cell-surface marker if it expresses the marker on its cell-surface in amounts sufficient to be detected using methods known to those of skill in the art, such as contacting a cell with an antibody that binds specifically to that marker, and subsequently performing flow cytometric analysis of such a contacted cell to determine whether the antibody is bound the cell. It is to be understood that while a cell may express messenger RNA for a cell-surface marker, in order to be considered positive for the methods described herein, the cell must express it on its surface. Similarly, a cell is considered “negative” for a cell-surface marker if it does not express the marker on its cell-surface in amounts sufficient to be detected using methods known to those of skill in the art, such as contacting a cell with an antibody that binds specifically to that marker and subsequently performing flow cytometric analysis of such a contacted cell to determine whether the antibody is bound the cell. In some embodiments, where agents specific for cell-surface lineage markers used, the agents can all comprise the same label or tag, such as fluorescent tag, and thus all cells positive for that label or tag can be excluded or removed, to leave uncontacted hematopoietic stem or progenitor cells for use in the methods described herein. In some embodiments of the aspects described herein, an agent specific for a cell-surface molecule, such as an antibody or antigen-binding fragment, is labeled with a tag to facilitate the isolation of the hematopoietic stem cells. The terms “label” or “tag”, as used herein, refer to a composition capable of producing a detectable signal indicative of the presence of a target, such as, the presence of a specific cell-surface marker in a biological sample. Suitable labels include fluorescent molecules, radioisotopes, nucleotide chromophores, enzymes, substrates, chemiluminescent moieties, magnetic particles, bioluminescent moieties, and the like. As such, a label is any composition detectable by spectroscopic, photochemical, biochemical, immunochemical, electrical, optical or chemical means needed for the methods to isolate and enrich endothelial cell progenitor cells.

[0303] In some embodiments of the aspects described herein, a variety of methods to isolate a substantially pure or enriched population of cells, such as myeloid cells, are available to a skilled artisan, including immunoselection techniques, such as high-throughput cell sorting using flow cytometric methods, affinity methods with antibodies labeled to magnetic beads, biodegradable beads, non-biodegradable beads, and antibodies panned to surfaces including dishes, and any combination of such methods.

[0304] As defined herein, “positive selection” refers to techniques that result in the isolation or enrichment of cells expressing specific cell-surface markers, while “negative selection” refers techniques that result in the isolation or enrichment of cells not expressing specific cell-surface markers. In some embodiments, beads can be coated with antibodies by a skilled artisan using standard techniques known in the art, such as commercial bead conjugation kits. In some embodiments, a negative selection step is performed to remove cells expressing one or more lineage markers, followed by fluorescence activated cell sorting to positively select cells expressing one or more specific cell-surface markers.

[0305] As defined herein, “flow cytometry” refers to a technique for counting and examining microscopic particles, such as cells and chromosomes, by suspending them in a stream of fluid and passing them through an electronic detection apparatus. Flow cytometry allows simultaneous multiparametric analysis of the physical and/or chemical parameters of up to thousands of particles per second, such as fluorescent parameters. Modern flow cytometric instruments usually have multiple lasers and fluorescence detectors. Increasing the number of lasers and detectors allows for labeling by multiple antibodies, and can more precisely identify a target population by their phenotypic markers. Certain flow cytometric instruments can take digital images of individual cells, allowing for the analysis of fluorescent signal location within or on the surface of cells.

[0306] A common variation of flow cytometric techniques is to physically sort particles based on their properties, so as to purify populations of interest, using “fluorescence-activated cell sorting” As defined herein, “fluorescence-activated cell sorting” or “flow cytometric based sorting” methods refer to flow cytometric methods for sorting a heterogeneous mixture of cells from a single biological sample into one or more containers, one cell at a time, based upon the specific light scattering and fluorescent characteristics of each cell and provides fast, objective and quantitative recording of fluorescent signals from individual cells as well as physical separation of cells of particular interest. Accordingly, in some embodiments, fluorescence-activated cell sorting (FACS) can be used with the methods described herein to isolate and enrich for populations of cells, such as myeloid cells, from a sample of hematopoietic cells.

[0307] In some embodiments of the methods described herein, the methods further comprise monitoring clonality of a HSC cardiometabolic driver gene somatic mutations in a subject. In other words, following the treatment, the size or percentage of the clone harboring a somatic mutation in a HSC cardiometabolic driver gene is determined to monitor the effectiveness of the treatment.

[0308] In some embodiments of the methods described herein, the methods further comprise decreasing the number or percentage of hematopoietic clones comprising the one or more a HSC cardiometabolic driver gene mutation(s) in the subject by transfusing the subject with hematopoietic stem cells in which the mutations are absent or reduced, for example, by administering a bone marrow transplant.

[0309] In some such embodiments, the subject is transfused with autologous bone marrow. Alternatively, or additionally, in some embodiments, the subject is transfused with allogeneic bone marrow.

[0310] A bone marrow transplant is a procedure where healthy bone marrow stem cells, are infused into a subject to replace damaged or diseased bone marrow, or to replace damaged peripheral blood cells generated from bone marrow stem cells. Prior to the transplant, chemotherapy, radiation, or both can be given. In what is known as ablative (myeloablative) treatment, typically used for cancer treatments, high-dose chemotherapy, radiation, or both are given to kill peripheral cells, as well as all healthy bone marrow that remains, and allows new stem cells to grow in the bone marrow. Reduced intensity treatments, also called a mini transplant, can also be performed where lower doses of chemotherapy and radiation are received before a transplant. For the methods described herein, where the issues arise from somatic mutations in the periphery, total ablation of the bone marrow may not be required.

[0311] If an autologous stem cell transplant is used, apheresis can be used to collect blood stem cells. Briefly, blood is withdrawn from the subject's body and one or more blood components are removed, such as all leukocytes or all myeloid cells, and transfusion of the remaining cells are performed. Before apheresis, daily injections of growth factor can be administered to increase stem cell production and move stem cells into circulating blood so they can be collected. During apheresis, blood is drawn from a vein and circulated through a machine. The machine separates blood into different parts, including hematopoietic stem cells. These stem cells can be collected and frozen for future use in the bone marrow transplant.

[0312] In some embodiments of the methods described herein, the methods further comprise decreasing the number or percentage of hematopoietic cells or clones comprising the one or more a HSC cardiometabolic driver gene mutations in the subject by performing therapeutic cytapheresis on the subject.

[0313] Therapeutic cytapheresis removes cellular components from blood, returning plasma. It is most often used to remove defective RBCs and substitute normal ones in patients with sickle cell anemia who have the following conditions: acute chest syndrome, stroke, pregnancy, or frequent, severe sickle cell crises. Other known uses of cytapheresis include collection of peripheral blood stem cells for autologous or allogeneic bone marrow reconstitution (an alternative to bone marrow transplantation) and collection of lymphocytes for use in immune modulation cancer therapy (adoptive immunotherapy).

[0314] In the methods described herein, a subject undergoing therapeutic cytapheresis can also be administered one or more agents to stimulate hematopoietic stem cell migration from the bone marrow to the blood, following removal of all cellular components from the blood using therapeutic cytapheresis.

[0315] In some embodiments, a subject undergoing therapeutic cytapheresis can further be transfused with autologous blood. Alternatively, or additionally, in some embodiments, the subject is further transfused with allogeneic blood.

[0316] In those embodiments where the subject is transfused with autologous blood, the blood can undergo processing steps prior to transfusion to remove and/or decrease the number of hematopoietic cells having the one or more a HSC cardiometabolic driver gene mutations. Such processing steps can include flow cytometric or magnetic bead-based sorting and enrichment methods to remove hematopoietic cells having the one or more a HSC cardiometabolic driver gene mutations

[0317] In some embodiments of the methods described herein, the subject is administered or transfused with hematopoietic cells that have been modified to correct any somatic mutations in a HSC cardiometabolic driver gene, using any method known in the art to modify or incorporate target genes into the genome of a cell so as to facilitate the expression of such genes, also referred to herein as “gene targeting” or “gene therapy” methods.

[0318] One system for the integration or modification of target genes into the genome of a hematopoietic cell is the clustered regularly interspaced short palindromic repeats (CRISPR)/Cas system, a system that originally evolved as an adaptive defense mechanism in bacteria and archaea against viral infection. The CRISPR/Cas system includes palindromic repeat sequences within plasmid DNA and an associated Cas9 nuclease. This ensemble of DNA and protein directs site specific DNA cleavage of a target sequence by first incorporating foreign DNA into CRISPR loci. Polynucleotides containing these foreign sequences and the repeat-spacer elements of the CRISPR locus are in turn transcribed in a host cell to create a guide RNA, which can subsequently anneal to a target sequence and localize the Cas9 nuclease to this site. In this manner, highly site-specific cas9-mediated DNA cleavage can be engendered in a foreign polynucleotide because the interaction that brings cas9 within close proximity of the target DNA molecule is governed by RNA:DNA hybridization. As a result, one can theoretically design a CRISPR/Cas system to cleave any target DNA molecule of interest. This technique has been exploited in order to edit eukaryotic genomes (Hwang et al. Nature Biotechnology 31:227 (2013) and can be used as an efficient means of site-specifically editing hematopoietic stem cell genomes in order to cleave DNA prior to the incorporation of a gene encoding a target gene, such as an HSC cardiometabolic driver gene gene lacking the somatic mutations described herein. The use of CRISPR/Cas to modulate gene expression has been described in, e.g., U.S. Pat. No. 8,697,359, the disclosure of which is incorporated herein by reference. Alternative methods for site-specifically cleaving genomic DNA prior to the incorporation of a gene of interest in a hematopoietic cell include the use of zinc finger nucleases (ZFNs) and transcription activator-like effector nucleases (TALENs). Unlike the CRISPR/Cas system, these enzymes do not contain a guiding polynucleotide to localize to a specific target sequence. Target specificity is instead controlled by DNA binding domains within these enzymes. The use of ZFNs and TALENs in genome editing applications is described, e.g., in Urnov et al. Nature Reviews Genetics 11:636 (2010); and in Joung et al. Nature Reviews Molecular Cell Biology 14:49 (2013), the disclosure of both of which are incorporated herein by reference.

[0319] Another method that can be used for incorporating polynucleotides encoding target genes into hematopoietic stem cells involves the use of transposons. Transposons are polynucleotides that encode transposase enzymes and contain a polynucleotide sequence or gene of interest flanked by 5′ and 3′ excision sites. Once a transposon has been delivered into a cell, expression of the transposase gene commences and results in active enzymes that cleave the gene of interest from the transposon. This activity is mediated by the site-specific recognition of transposon excision sites by the transposase. In certain cases, these excision sites may be terminal repeats or inverted terminal repeats. Once excised from the transposon, the gene of interest can be integrated into the genome of a mammalian cell by transposase-catalyzed cleavage of similar excision sites that exist within the nuclear genome of the cell. This allows the gene of interest to be inserted into the cleaved nuclear DNA at the complementary excision sites, and subsequent covalent ligation of the phosphodiester bonds that join the gene of interest to the DNA of the mammalian cell genome completes the incorporation process. In certain cases, the transposon may be a retrotransposon, such that the gene encoding the target gene is first transcribed to an RNA product and then reverse-transcribed to DNA before incorporation in the mammalian cell genome. Exemplary transposon systems include the piggybac transposon (described in detail in, e.g., WO 2010/085699) and the sleeping beauty transposon (described in detail in, e.g., US2005/0112764), the disclosures of each of which are incorporated herein by reference.

[0320] Additional genome editing techniques that can be used to incorporate polynucleotides encoding target genes into the genome of a hematopoietic cell include the use of ARCUS™ meganucleases that can be rationally designed so as to site-specifically cleave genomic DNA. The use of these enzymes for the incorporation of genes encoding target genes into the genome of a mammalian cell is advantageous in view of the defined structure-activity relationships that have been established for such enzymes. Single chain meganucleases can be modified at certain amino acid positions in order to create nucleases that selectively cleave DNA at desired locations, enabling the site-specific incorporation of a target gene into the nuclear DNA of a hematopoietic stem cell. These single-chain nucleases have been described extensively in, e.g., U.S. Pat. Nos. 8,021,867 and 8,445,251, the disclosures of each of which are incorporated herein by reference.

[0321] Another example of a platform that can be used to facilitate the expression of a target gene in a hematopoietic cell is by the integration of the polynucleotide encoding a target gene into the nuclear genome of the cell. A variety of techniques have been developed for the introduction of exogenous genes into a eukaryotic genome. One such technique involves the insertion of a target gene into a vector, such as a viral vector. Vectors for use with the compositions and methods of the invention can be introduced into a cell by a variety of methods, including transformation, transfection, direct uptake, projectile bombardment, and by encapsulation of the vector in a liposome, and are well known in the art. Examples of suitable methods of transfecting or transforming cells include calcium phosphate precipitation, electroporation, microinjection, infection, lipofection and direct uptake. Such methods are described in more detail, for example, in Green, et al., Molecular Cloning: A Laboratory Manual, Fourth Edition, Cold Spring Harbor University Press, New York (2014); and Ausubel, et al., Current Protocols in Molecular Biology, John Wiley & Sons, New York (2015), the disclosures of each of which are incorporated herein by reference.

[0322] Examples of viral vectors useful in the methods described herein include a retrovirus, adenovirus (e.g., Ad5, Ad26, Ad34, Ad35, and Ad48), parvovirus (e.g., adeno-associated viruses), coronavirus, negative strand RNA viruses such as orthomyxovirus (e.g., influenza virus), rhabdovirus (e.g., rabies and vesicular stomatitis virus), paramyxovirus (e.g. measles and Sendai), positive strand RNA viruses, such as picornavirus and alphavirus, and double stranded DNA viruses including herpes virus (e.g., Herpes Simplex virus types 1 and 2, Epstein-Barr virus, cytomegalovirus), and poxvirus (e.g., vaccinia, modified vaccinia Ankara (MVA), fowlpox and canarypox). Other viruses include Norwalk virus, togavirus, flavivirus, reoviruses, papovavirus, hepadnavirus, and hepatitis virus, for example. Examples of retroviruses include: avian leukosis-sarcoma, mammalian C-type, B-type viruses, D-type viruses, HTLV-BLV group, lentivirus, spumavirus (Coffin, J. M., Retroviridae: The viruses and their replication, In Fundamental Virology, Third Edition, B. N. Fields, et al., Eds., Lippincott-Raven Publishers, Philadelphia, 1996, the disclosure of which is incorporated herein by reference). Other examples of viral vectors include murine leukemia viruses, murine sarcoma viruses, mouse mammary tumor virus, bovine leukemia virus, feline leukemia virus, feline sarcoma virus, avian leukemia virus, human T-cell leukemia virus, baboon endogenous virus, Gibbon ape leukemia virus, Mason Pfizer monkey virus, simian immunodeficiency virus, simian sarcoma virus, Rous sarcoma virus and lentiviruses. Other examples of vectors are described in, e.g., U.S. Pat. No. 5,801,030, the disclosure of which is incorporated herein by reference.

[0323] In some embodiments, the methods further comprise initiating a monitoring regimen following the administration of one or more treatments to the subject. For example, monitoring includes repeating the diagnostic steps of the method on the subject on a monthly, bi-monthly or quarterly basis to determine whether there is, for example, reduced IL-1β, IL-6, and/or TNFα proinflammatory activity or decreased percentages of hematopoietic cells in the blood having one or more a HSC cardiometabolic driver gene mutations described herein.

[0324] In some embodiments of the methods described herein, the theranostic methods comprise further administering one or more additional therapeutic agents to the subject, in addition to the inhibitor of a HSC cardiometabolic driver gene mutation-mediated proinflammatory activity. Such an additional therapeutic agent can be co-administered with the inhibitor of an HSC cardiometabolic driver gene mutation-mediated proinflammatory activity. As used herein, the phrase “co-administering” or to “co-administer” means the administration of an inhibitor described herein and another compound, e.g., a therapeutic agent, separately, simultaneously, and/or sequentially over a period of time as determined by a qualified care giver.

[0325] Non-limiting examples of additional therapeutic agents that can be administered to a subject having one or more somatic mutations in one or more HSC cardiometabolic driver genes include quinidine, procainamide, disopyramide, lidocaine, phenytoin, mexiletine, flecainide, propafenone, moricizine, propranolol, esmolol, timolol, metoprolol, atenolol, bisoprolol, amiodarone, sotalol, ibutilide, dofetilide, dronedarone, E-4031, verapamil, diltiazem, adenosine, digoxin, magnesium sulfate, warfarin, heparins, anti-platelet drugs (e.g., aspirin and clopidogrel), beta blockers (e.g., metoprolol and carvedilol), angiotensin-converting enzyme (ACE) inhibitors (e.g., captopril, zofenopril, enalapril, ramipril, quinapril, perindopril, lisinopril, benazepril, fosinopril, casokinins and lactokinins), statins (e.g., atorvastatin, cerivastatin, fluvastatin, lovastatin, pitavastatin, mevastatin, pravastatin, rosuvastatin, and simvastatin), aldosterone antagonist agents (e.g., eplerenone and spironolactone), digitalis, diuretics, digoxin, inotropes (e.g., Milrinone), vasodilators and omega-3 fatty acids and combinations thereof.

[0326] In some aspects and embodiments of the methods directed to treatment of chronic kidney diseases, the additional therapeutic agent is an angiotensin-converting enzyme (ACE) inhibitor, an angiotensin II receptor blocker (ARB), or a mineralocorticoid receptor (MR) antagonist.

[0327] ACE inhibitors for use with the compositions and methods described herein include, but are not limited to, benazepril (marketed in the U.S. as LOTENSIN™), captopril (marketed in the U.S. as CAPOTEN™), enalapril/enalaprilat (marketed in the U.S. as VASOTEC™ oral and injectable), fosinopril (marketed in the U.S. as MONOPRIL™), lisinopril (marketed in the U.S. as ZESTRIL™ and PRINIVIL™), moexipril (marketed in the U.S. as UNIVASC™), perindopril (marketed in the U.S. as ACEON™), quinapril (marketed in the U.S. as ACCUPRIL™), ramipril (marketed in the U.S. as ALTACE™), and trandolapril (marketed in the U.S. as MAVIK™). ARBs for use with the inhibitors described herein include candesartan (marketed in the U.S. as ATACAND™), irbesartan (marketed in the U.S. as AVAPRO™), olmesartan (marketed in the U.S. as BENICARM), losartan (marketed in the U.S. as COZAAR™), valsartan (marketed in the U.S. as DIOVAN™), telmisartan (marketed in the U.S. as MICARDIS™), and eprosartan (marketed in the U.S. as TEVETEN™).

[0328] In some embodiments of these methods and all such methods described herein, the method further comprises administering to the subject an effective amount of a diuretic. Diuretics include, but are not limited to, torsemide (marketed in the U.S. as DEMADEX™), furosemide (marketed in the U.S. as LASIX™), bumetanide (marketed in the U.S. as BUMEX™), ethacrynic acid (marketed in the U.S. as EDECRIN™), torsemide (marketed in the U.S. as DEMADEX™), amiloride, (marketed in the U.S. as MIDAMOR™), acetazolamide (marketed in the U.S. as DIAMOXm), pamabrom (marketed in the U.S. as AQUA-BAN™), mannitol (marketed in the U.S. as ARIDOL™ or OSMITROL™), traimterene (marketed in the U.S. as DYRENIUM™), spironolactone (marketed in the U.S. as ALDACTONE), amiloride (marketed in the U.S. as MIDAMOR™), indapamide (marketed in the U.S. as LOZOLh), hydrochlorothiazide (marketed in the U.S. as HYDRODIURIL™), metolazone (marketed in the U.S. as ZAROXOLYN™ or MYKROX™), methylclothiazide (marketed in the U.S. as AQUATENSEN™ or ENDURON™), hydrocholorthiazide (marketed in the U.S. as AQUAZIDE H™ or ESIDRIX™ or MICROZIDE™), chlorothiazide (marketed in the U.S. as DIURIL™), bendroflumethiazide (marketed in the U.S. as NATURETIN™), polythiazide (marketed in the U.S. as RENESE™), hydroflumethiazide (marketed in the U.S. as SALURON™), and chlorthalidone (marketed in the U.S. as THALITONE™). For a complete listing also see, e.g., Physician's Desk Reference, 2017 Edition, PDR Network (2016).

[0329] As used herein, the terms “treat” or “treatment” or “treating” as used herein in reference to use of inhibitors of a HSC cardiometabolic driver gene mutation-mediated IL-1β, IL-6, and/or TNFα proinflammatory activity for the treatment of a cardiovascular disease or disorder refers to therapeutic treatment, wherein the object is to prevent or slow the development of the disease, such as slow down the development of a cardiac disorder, or reducing at least one adverse effect or symptom of a cardiovascular condition, disease or disorder, i.e., any disorder characterized by insufficient or undesired cardiac function. Adverse effects or symptoms of cardiac disorders are well-known in the art and include, but are not limited to, dyspnea, chest pain, palpitations, dizziness, syncope, edema, cyanosis, pallor, fatigue and death. Treatment is generally “effective” if one or more symptoms or clinical markers are reduced as that term is defined herein. Alternatively, a treatment is “effective” if the progression of a disease is reduced or halted. That is, “treatment” includes not just the improvement of symptoms or decrease of markers of the disease, but also a cessation or slowing of progress or worsening of a symptom that would be expected in absence of treatment. Beneficial or desired clinical results include, but are not limited to, alleviation of one or more symptom(s), diminishment of extent of disease, stabilized (i.e., not worsening) state of disease, delay or slowing of disease progression, amelioration or palliation of the disease state, and remission (whether partial or total), whether detectable or undetectable. “Treatment” can also mean prolonging survival as compared to expected survival if not receiving treatment.

[0330] In some embodiments, the term “treating” when used in reference to a treatment of a cardiovascular disease or disorder is used to refer to the reduction of a symptom and/or a biochemical marker of a cardiovascular disease or disorder, for example a reduction in at least one biochemical marker of a cardiovascular disease by at least about 10% would be considered an effective treatment. Examples of such biochemical markers of cardiovascular disease include a reduction of, for example, creatine phosphokinase (CPK), aspartate aminotransferase (AST), lactate dehydrogenase (LDH) in the blood, and/or a decrease in a symptom of cardiovascular disease, such as atherosclerosis, and/or an improvement in blood flow and cardiac function as determined by someone of ordinary skill in the art as measured by electrocardiogram (ECG or EKG), or echocardiogram (heart ultrasound), Doppler ultrasound and nuclear medicine imaging. A reduction in a symptom of a cardiovascular disease by at least about 10% would also be considered effective treatment by the methods as disclosed herein. As alternative examples, a reduction in a symptom of cardiovascular disease, for example a reduction of at least one of the following; dyspnea, chest pain, palpitations, dizziness, syncope, edema, cyanosis etc. by at least about 10% or a cessation of such systems, or a reduction in the size one such symptom of a cardiovascular disease by at least about 10% would also be considered as affective treatments by the methods as disclosed herein. In some embodiments, it is preferred, but not required that the therapeutic agent actually eliminate the cardiovascular disease or disorder, rather just reduce a symptom to a manageable extent.

[0331] The term “effective amount” as used herein refers to the amount of therapeutic agent of pharmaceutical composition to alleviate at least one or more symptom of the disease or disorder, and relates to a sufficient amount of pharmacological composition to provide the desired effect. With reference to the treatment of, for example, a cardiovascular condition or disease in a subject, the term “effective amount” refers to the amount that is safe and sufficient to prevent or delay the development or a cardiovascular disease or disorder. The amount can thus cure or cause the cardiovascular disease or disorder to go into remission, slow the course of cardiovascular disease progression, slow or inhibit a symptom of a cardiovascular disease or disorder, slow or inhibit the establishment of secondary symptoms of a cardiovascular disease or disorder or inhibit the development of a secondary symptom of a cardiovascular disease or disorder. The effective amount for the treatment of the cardiovascular disease or disorder depends on the type of cardiovascular disease to be treated, the severity of the symptoms, the subject being treated, the age and general condition of the subject, the mode of administration and so forth. Thus, it is not possible to specify the exact “effective amount”. However, for any given case, an appropriate “effective amount” can be determined by one of ordinary skill in the art using only routine experimentation. The efficacy of treatment can be judged by an ordinarily skilled practitioner, for example, efficacy can be assessed in animal models of a cardiovascular disease or disorder as discussed herein, and any treatment or administration of the compositions or formulations that leads to a decrease of at least one symptom of the cardiovascular disease or disorder as disclosed herein, for example, decreased levels of atherosclerosis in the blood vessels, increased heart ejection fraction, decreased rate of heart failure, decreased infarct size, decreased associated morbidity (pulmonary edema, renal failure, arrhythmias) improved exercise tolerance or other quality of life measures, and decreased mortality indicates effective treatment.

[0332] By “reduce” or “inhibit” in terms of the methods of treatment of chronic kidney disease and proteinuria described herein is meant the ability to cause an overall decrease preferably of 20% or greater, 30% or greater, 40% or greater, 45% or greater, more preferably of 50% or greater, of 55% or greater, of 60% or greater, of 65% or greater, of 70% or greater, and most preferably of 75% or greater, 80% or greater, 85% or greater, 90% or greater, or 95% or greater, for a given parameter or symptom of a chronic kidney disease. Reduce or inhibit can refer to, for example, symptoms of the disorder being treated, for example, high blood pressure, protein in the urine, etc.

[0333] High blood pressure is almost always present during all stages of chronic kidney disease. A nervous system exam may show signs of nerve damage. The health care provider may hear abnormal heart or lung sounds when listening with a stethoscope. The early symptoms of chronic kidney disease are also symptoms of other illnesses. These symptoms can be the only signs of kidney disease until the condition is more advanced. Symptoms of chronic kidney disease can include: appetite loss; general ill feeling and fatigue; headaches; itching (pruritus) and dry skin; nausea; weight loss without trying to lose weight; etc. Other symptoms that can develop, especially when kidney function has gotten worse, include: abnormally dark or light skin; bone pain; brain and nervous system symptoms; drowsiness and confusion; problems concentrating or thinking; numbness in the hands, feet, or other areas; muscle twitching or cramps; breath odor; easy bruising, bleeding, or blood in the stool; excessive thirst; frequent hiccups; low level of sexual interest and impotence; stopping of menstrual periods (amenorrhea); shortness of breath; sleep problems, such as insomnia, restless leg syndrome, and obstructive sleep apnea; swelling of the feet and hands (edema); vomiting, typically in the morning.

[0334] Accordingly, in some embodiments of the methods described herein, an effective amount of a composition comprising an inhibitor of an HSC cardiometabolic driver gene mutation-mediated proinflammatory activity described herein is administered to a subject in order to alleviate one or more symptoms of chronic kidney disease. As used herein, “alleviating a symptom chronic kidney disease” is ameliorating any condition or symptom associated with the chronic kidney disease. Alternatively, alleviating a symptom of a chronic kidney disease can involve reducing one or more symptoms of the chronic kidney disease in the subject relative to an untreated control suffering from chronic kidney disease or relative to the subject prior to the treatment. As compared with an equivalent untreated control, or the subject prior to the treatment with the inhibitor, such reduction or degree of prevention is at least 5%, at least 10%, at least 15%, at least 20%, at least 25%, at least 30%, at least 35%, at least 40%, at least 45%, at least 50%, at least 55%, at least 60%, at least 65%, at least 70%, at least 75%, at least 80%, at least 85%, at least 90%, at least 95%, or more, as measured by any standard technique. Desirably, the chronic kidney disease is significantly reduced or undetectable, as detected by any standard method known in the art, in which case the chronic kidney disease is considered to have been treated. A patient who is being treated for a chronic kidney disease is one who a medical practitioner has diagnosed as having such a condition. Diagnosis can be by any suitable means known to one of ordinary skill in the art. Diagnosis and monitoring can involve, for example, detecting the level of specific proteins or molecules in a urine, blood, or serum sample, such as, for example, albumin, calcium, cholesterol, complete blood count (CBC), electrolytes, magnesium, phosphorous, potassium, sodium, or any combination thereof, assays to detect, for example, creatinine clearance; creatinine levels; BUN (blood urea nitrogen); through the use of specific techniques or procedures, such as an abdominal CT scan, abdominal MRI, abdominal ultrasound, kidney biopsy, kidney scan, kidney ultrasound; via detection of changes in results of assays or tests for erythropoietin, PTH; bone density test, or Vitamin D; or any combination of such detection methods and assays.

[0335] The compositions and methods described herein ideally result in a therapeutic significant reduction in one or more symptoms. A therapeutically significant reduction in a symptom is, e.g. at least about 10%, at least about 20%, at least about 30%, at least about 40%, at least about 50%, at least about 60%, at least about 70%, at least about 80%, at least about 90%, at least about 100%, at least about 125%, at least about 150% or more in a measured parameter as compared to a control or non-treated subject. Measured or measurable parameters include clinically detectable markers of disease, for example, elevated or depressed levels of a biological marker, as well as parameters related to a clinically accepted scale of symptoms or markers for a disease or disorder. It will be understood, that the total daily usage of the compositions and formulations as disclosed herein will be decided by the attending physician within the scope of sound medical judgment. The exact amount required will vary depending on factors such as the type of disease being treated.

[0336] The inhibitors of a HSC cardiometabolic driver gene mutation-mediated proinflammatory activity described herein can be administered using any means or route known to those of ordinary skill in the art and known to provide desired effects. As used herein, the terms “administering,” and “introducing” are used interchangeably herein and refer to the placement of the therapeutic agents as disclosed herein into a subject by a method or route which results in delivering of such agent(s) at a desired site. The compounds can be administered by any appropriate route which results in an effective treatment in the subject, including topical administration.

[0337] Routes of administration include, but are not limited to aerosol, direct injection, intradermal, transdermal (e.g., in slow release polymers), intravitreal, intramuscular, intraperitoneal, intravenous, subcutaneous, intranasal, epidural, topical, oral, transmucosal, buccal, rectal, vaginal, transdermal, intranasal and parenteral routes.

[0338] The phrases “parenteral administration” and “administered parenterally” as used herein mean modes of administration other than enteral and topical administration, usually by injection, and includes, without limitation, intravenous, intramuscular, intraarterial, intrathecal, intraventricular, intracapsular, intraorbital, intracardiac, intradermal, intraperitoneal, transtracheal, subcutaneous, subcuticular, intraarticular, sub capsular, subarachnoid, intraspinal, intracerebro spinal, and intrasternal injection and infusion. The phrases “systemic administration,” “administered systemically”, “peripheral administration” and “administered peripherally” as used herein mean the administration therapeutic compositions other than directly into a tumor such that it enters the animal's system and, thus, is subject to metabolism and other like processes.

[0339] The phrase “pharmaceutically acceptable” is employed herein to refer to those compounds, materials, compositions, and/or dosage forms which are, within the scope of sound medical judgment, suitable for use in contact with the tissues of human beings and animals without excessive toxicity, irritation, allergic response, or other problem or complication, commensurate with a reasonable benefit/risk ratio. The phrase “pharmaceutically acceptable carrier” as used herein means a pharmaceutically acceptable material, composition or vehicle, such as a liquid or solid filler, diluent, excipient, solvent or encapsulating material, involved in maintaining the activity of or carrying or transporting the subject agents from one organ, or portion of the body, to another organ, or portion of the body. In addition to being “pharmaceutically acceptable” as that term is defined herein, each carrier must also be “acceptable” in the sense of being compatible with the other ingredients of the formulation. The pharmaceutical formulation contains a compound of the invention in combination with one or more pharmaceutically acceptable ingredients. The carrier can be in the form of a solid, semi-solid or liquid diluent, cream or a capsule. These pharmaceutical preparations are a further object of the invention. Usually the amount of active compounds is between 0.1-95% by weight of the preparation, preferably between 0.2-20% by weight in preparations for parenteral use and preferably between 1 and 50% by weight in preparations for oral administration. For the clinical use of the methods of the present invention, targeted delivery composition of the invention is formulated into pharmaceutical compositions or pharmaceutical formulations for parenteral administration, e.g., intravenous; mucosal, e.g., intranasal; enteral, e.g., oral; topical, e.g., transdermal; ocular, e.g., via corneal scarification or other mode of administration. The pharmaceutical composition contains a compound of the invention in combination with one or more pharmaceutically acceptable ingredients. The carrier can be in the form of a solid, semi-solid or liquid diluent, cream or a capsule.

[0340] It is understood that the foregoing description and the following examples are illustrative only and are not to be taken as limitations upon the scope of the invention. Various changes and modifications to the disclosed embodiments, which will be apparent to those of skill in the art, may be made without departing from the spirit and scope of the present invention. Further, all patents, patent applications, and publications identified are expressly incorporated herein by reference for the purpose of describing and disclosing, for example, the methodologies described in such publications that might be used in connection with the present invention. These publications are provided solely for their disclosure prior to the filing date of the present application. Nothing in this regard should be construed as an admission that the inventors are not entitled to antedate such disclosure by virtue of prior invention or for any other reason. All statements as to the date or representation as to the contents of these documents are based on the information available to the applicants and do not constitute any admission as to the correctness of the dates or contents of these documents.

[0341] All patents and other publications identified are expressly incorporated herein by reference for the purpose of describing and disclosing, for example, the methodologies described in such publications that could be used in connection with the present invention. These publications are provided solely for their disclosure prior to the filing date of the present application. Nothing in this regard should be construed as an admission that the inventors are not entitled to antedate such disclosure by virtue of prior invention or for any other reason. All statements as to the date or representation as to the contents of these documents is based on the information available to the applicants and does not constitute any admission as to the correctness of the dates or contents of these documents.

[0342] Some embodiments of the technology described herein can be defined according to any of the following numbered paragraphs:

1. A method for treating a subject having, or at risk for, a HSC (hematopoietic stem cell) cardiometabolic driver gene mutation-mediated proinflammatory disease comprising: administering a therapeutically effective amount of a pharmaceutical composition comprising an inhibitor of HSC cardiometabolic driver gene mutation-mediated proinflammatory activity and a pharmaceutically acceptable carrier to a subject having one or more somatic mutations in one or more HSC cardiometabolic driver gene in a sub-population of peripheral blood hematopoietic cells.
2. The method of paragraph 1, wherein the one or more somatic mutations in the one or more HSC cardiometabolic driver genes in the sub-population of peripheral blood hematopoietic cells cause clonal hematopoiesis in the subject.
3. The method of any one of paragraphs 1 or 2, wherein at least 2% of the peripheral blood hematopoietic cells have the one or more somatic mutations in the one or more HSC cardiometabolic driver genes.
4. The method of any one of paragraphs 1-3, wherein the one or more HSC cardiometabolic driver genes are selected from TP53, JAK2, DNMT3A, ASXL1, and PPM1D/WIP1.
5. The method of paragraph 4, wherein the one or more somatic mutations are in TP53 and are selected from a G743A mutation in SEQ ID NO:2 and a A659G mutation in SEQ ID NO: 2.
6. The method of any one of paragraphs 4 or 5, wherein the one or more somatic mutations are in JAK2 and is a G1849T in SEQ ID NO: 56.
7. The method of any one of paragraphs 4-6, wherein the one or more somatic mutations are in DNMT3A and are selected from a T1115C mutation in SEQ ID NO: 37; a C2711T mutation in SEQ ID NO: 37; a C1837G mutation in SEQ ID NO: 37; a A1666G mutation in SEQ ID NO: 37; a C1789T mutation in SEQ ID NO: 37; a G2719A mutation in SEQ ID NO: 37; a G1627T mutation in SEQ ID NO: 37; an A2723G mutation in SEQ ID NO: 37; a G1797T mutation in SEQ ID NO: 37; a T2252G mutation in SEQ ID NO: 37; a C1560A mutation in SEQ ID NO: 37; a T1031C mutation in SEQ ID NO: 37; a G2645A mutation in SEQ ID NO: 37; a C2043G mutation in SEQ ID NO: 37; a C2446T mutation in SEQ ID NO: 37; a A2198G mutation in SEQ ID NO: 37; A2281G mutation in SEQ ID NO: 37; a C920G mutation in SEQ ID NO: 37; a A2204G mutation in SEQ ID NO: 37; and a frameshift mutation in DNMT3A.
8. The method of any one of paragraphs 4-7, wherein the one or more somatic mutations are in ASXL1 and are selected from a C2407T mutation in SEQ ID NO: 61; a C2893T mutation in SEQ ID NO: 61; a 1926_1926delinsAG mutation in SEQ ID NO: 61; and a frameshift mutation in ASXL1.
9. The method of any one of paragraphs 4-8, wherein the one or more somatic mutations are in PPM1D and are selected from a G1618T mutation in SEQ ID NO: 64; a C1372T mutation in SEQ ID NO: 64; and a frameshift mutation in PPM1D.
10. The method of any one of paragraphs 1-9, wherein the subject further has one or more somatic mutations in TET2 in a sub-population of peripheral blood hematopoietic cells selected from an S282F mutation in SEQ ID NO: 68, an N312S mutation in SEQ ID NO: 68, an L346P mutation in SEQ ID NO: 68, an S460F mutation in SEQ ID NO: 68, a D666G mutation in SEQ ID NO: 68, a P941S mutation in SEQ ID NO: 68, and a C1135Y mutation in SEQ ID NO: 68.
11. The method of any one of paragraphs 1-10, wherein the inhibitor of HSC cardiometabolic driver gene mutation-mediated proinflammatory activity is an IL-1β inhibitor.
12. The method of paragraph 11, wherein the IL-1β inhibitor is an IL-1β inhibitor antibody or antigen-binding fragment thereof that binds to IL-1β and reduces IL-1β binding to its receptor(s).
13. The method of paragraph 12, wherein the IL-1β inhibitor antibody or antigen-binding fragment thereof is selected from ABT981, an anti-interleukin-11 inhibitor antibody by ABZYME, APX002, Canakinumab/Ilaris, CDP48, immunereszumab, LY2189102, MEDI8968, and XOMA052.
14. The method of paragraph 11, wherein the IL-1β inhibitor is an IL-1 receptor antagonist.
15. The method of paragraph 14, wherein the IL-1 receptor antagonist is selected from CDP484, CP412245, CYT013 IL1bQb, XL 130, AMG108, HL 2351, IL1Hyl, AXXO, orthokine, PRT 1000, anakinra, and rilonacept.
16. The method of paragraph 11, wherein the IL-1β inhibitor is a small molecule or microRNA inhibitor that inhibits IL-1β-mediated pro-inflammatory activity.
17. The method of paragraph 16, wherein the small molecule or microRNA inhibitor is selected from AC201, CP412245, MCC950 or CRID3, inflabion, inflammasome modulator OPSONA, PGE3935199, PGE527667, TRK530, β-hydroxybutyrate (BHB), and microRNA-223.
18. The method of paragraph 17, wherein the small molecule inhibitor is MCC950.
19. The method of any one of paragraphs 1-18, wherein the inhibitor of HSC cardiometabolic driver gene mutation-mediated proinflammatory activity is an IL-6 inhibitor.
20. The method of paragraph 19, wherein the IL-6 inhibitor is an IL-6 inhibitor antibody or antigen-binding fragment thereof that binds to IL-6 and reduces IL-6 binding to its receptor(s).
21. The method of paragraph 20, wherein the IL-6 inhibitor antibody or antigen-binding fragment thereof is selected from Siltuximab, Olokizumab, Elsilimomab, mAb 1339, Sirukumab, Clazakizumab, ARGX-109, FM101, and C326.
22. The method of paragraph 19, wherein the IL-6 inhibitor is an IL-6 receptor antagonist.
23. The method of paragraph 22, wherein the IL-6 receptor antagonist is selected from tocilizumab, sarilumab, REGN88, FE301, and LMT-28.
24. The method of paragraph 19, wherein the IL-6 inhibitor is a small molecule or microRNA inhibitor.
25. The method of paragraph 24, wherein the small molecule IL-6 inhibitor is ALX-0061 or LMT-28.
26. The method of paragraph 19, wherein the IL-6 inhibitor is a JAK-STAT inhibitor.
27. The method of paragraph 26, wherein the JAK-STAT inhibitor is selected from baricitinib, decernotinid, filgotinib, INCB-039110, ruxolitinib, tofacitinib, Oclacitinib, Gandotinib, Lestaurtinib, Momelotinib, Pacritinib, PF-04965842, Upadacitinib, and Peficitinib.
28. The method of any one of paragraphs 1-27, wherein the inhibitor of HSC cardiometabolic driver gene mutation-mediated proinflammatory activity is a TNFα inhibitor.
29. The method of paragraph 28, wherein the TNFα inhibitor is a TNFα inhibitor antibody or antigen-binding fragment thereof that binds to TNFα and reduces TNFα binding to its receptor(s).
30. The method of paragraph 29, wherein the TNFα inhibitor antibody or antigen-binding fragment thereof is selected from adalimumab, Adalimumab-atto, certolizumab pegol, golimumab, infliximab,
31. The method of paragraph 28, wherein the TNFα inhibitor is a TNFα receptor antagonist.
32. The method of paragraph 31, wherein the TNFα receptor antagonist is etanercept.
33. The method of paragraph 28, wherein the TNFα inhibitor is a small molecule or microRNA inhibitor.
34. The method of any one of paragraphs 1-33, further comprising monitoring hematopoietic cell clonality, IL-1β proinflammatory activity, IL-6 proinflammatory activity, TNFα proinflammatory activity or any combination thereof following the administration of the inhibitor of HSC cardiometabolic driver gene mutation-mediated proinflammatory activity.
35. The method of any one of paragraphs 1-34, further comprising decreasing the number or percentage of hematopoietic cells comprising the one or more somatic mutations in the one or more HSC cardiometabolic driver genes in the subject by performing therapeutic cytapheresis on the subject.
36. The method of any one of paragraphs 1-35, further comprising administering one or more additional therapeutic agents to the subject.
37. A method for treating a subject having, or at risk for, a HSC cardiometabolic driver gene mutation-mediated proinflammatory disease comprising:

[0343] (a) sequencing a hematopoietic cell sample from a subject to identify one or more somatic mutations in one or more HSC cardiometabolic driver genes in the hematopoietic cell sample; and

[0344] (b) administering a therapeutically effective amount of a pharmaceutical composition comprising an inhibitor of HSC cardiometabolic driver gene mutation-mediated proinflammatory activity and a pharmaceutically acceptable carrier if one or more somatic mutations in one or more HSC cardiometabolic driver genes are identified in the hematopoietic cell sample.

38. The method of paragraph 37, wherein the hematopoietic cell sample is a peripheral blood hematopoietic cell sample.
39. The method of any one of paragraphs 37 or 38, wherein the hematopoietic cell sample is enriched for myeloid-derived cells.
40. The method of any one of paragraphs 37-39, wherein the one or more somatic mutations in the one or more HSC cardiometabolic driver genes identified in the hematopoietic cell sample cause clonal hematopoiesis in the subject.
41. The method of any one of paragraphs 37-40, wherein at least 2% of the hematopoietic cells are identified as having one or more HSC cardiometabolic driver gene mutations.
42. The method of any one of paragraphs 37-41, wherein the one or more HSC cardiometabolic driver genes are selected from TP53, JAK2, DNMT3A, ASXL1, and PPM1D/WIP1.
43. The method of paragraph 42, wherein the one or more somatic mutations are in TP53 and are selected from a G743A mutation in SEQ ID NO:2 and a A659G mutation in SEQ ID NO: 2.
44. The method of any one of paragraphs 42 or 43, wherein the one or more somatic mutations are in JAK2 and is a G1849T in SEQ ID NO: 56.
45. The method of any one of paragraphs 42-44, wherein the one or more somatic mutations are in DNMT3A and are selected from a T1115C mutation in SEQ ID NO: 37; a C2711T mutation in SEQ ID NO: 37; a C1837G mutation in SEQ ID NO: 37; a A1666G mutation in SEQ ID NO: 37; a C1789T mutation in SEQ ID NO: 37; a G2719A mutation in SEQ ID NO: 37; a G1627T mutation in SEQ ID NO: 37; an A2723G mutation in SEQ ID NO: 37; a G1797T mutation in SEQ ID NO: 37; a T2252G mutation in SEQ ID NO: 37; a C1560A mutation in SEQ ID NO: 37; a T1031C mutation in SEQ ID NO: 37; a G2645A mutation in SEQ ID NO: 37; a C2043G mutation in SEQ ID NO: 37; a C2446T mutation in SEQ ID NO: 37; a A2198G mutation in SEQ ID NO: 37; A2281G mutation in SEQ ID NO: 37; a C920G mutation in SEQ ID NO: 37; a A2204G mutation in SEQ ID NO: 37; and a frameshift mutation in DNMT3A.
46. The method of any one of paragraphs 42-45, wherein the one or more somatic mutations are in ASXL1 and are selected from a C2407T mutation in SEQ ID NO: 61; a C2893T mutation in SEQ ID NO: 61; a 1926_1926delinsAG mutation in SEQ ID NO: 61; and a frameshift mutation in ASXL1.
47. The method of any one of paragraphs 42-46, wherein the one or more somatic mutations are in PPM1D and are selected from a G1618T mutation in SEQ ID NO: 64; a C1372T mutation in SEQ ID NO: 64; and a frameshift mutation in PPM1D.
48. The method of any one of paragraphs 37-47, wherein the subject further has one or more somatic mutations in TET2 in a sub-population of peripheral blood hematopoietic cells selected from an S282F mutation in SEQ ID NO: 68, an N312S mutation in SEQ ID NO: 68, an L346P mutation in SEQ ID NO: 68, an S460F mutation in SEQ ID NO: 68, a D666G mutation in SEQ ID NO: 68, a P941S mutation in SEQ ID NO: 68, and a C1135Y mutation in SEQ ID NO: 68.
49. The method of any one of paragraphs 37-48, wherein the inhibitor of HSC cardiometabolic driver gene mutation-mediated proinflammatory activity is an IL-1β inhibitor.
50. The method of paragraph 49, wherein the IL-1β inhibitor is an IL-1β inhibitor antibody or antigen-binding fragment thereof that binds to IL-1β and reduces IL-1β binding to its receptor(s).
51. The method of paragraph 50, wherein the IL-1β inhibitor antibody or antigen-binding fragment thereof is selected from ABT981, an anti-interleukin-11 inhibitor antibody by ABZYME, APX002, Canakinumab/Ilaris, CDP48, immunereszumab, LY2189102, MEDI8968, and XOMA052.
52. The method of paragraph 49, wherein the IL-1β inhibitor is an IL-1 receptor antagonist.
53. The method of paragraph 52, wherein the IL-1 receptor antagonist is selected from CDP484, CP412245, CYT013 IL1bQb, XL 130, AMG108, HL 2351, IL1Hyl, AXXO, orthokine, PRT 1000, anakinra, and rilonacept.
54. The method of paragraph 49, wherein the IL-1β inhibitor is a small molecule or microRNA inhibitor that inhibits IL-1β-mediated pro-inflammatory activity.
55. The method of paragraph 54, wherein the small molecule or microRNA inhibitor is selected from AC201, CP412245, MCC950 or CRID3, inflabion, inflammasome modulator OPSONA, PGE3935199, PGE527667, TRK530, β-hydroxybutyrate (BHB), and microRNA-223.
56. The method of paragraph 55, wherein the small molecule inhibitor is MCC950.
57. The method of any one of paragraphs 37-56, wherein the inhibitor of HSC cardiometabolic driver gene mutation-mediated proinflammatory activity is an IL-6 inhibitor.
58. The method of paragraph 57, wherein the IL-6 inhibitor is an IL-6 inhibitor antibody or antigen-binding fragment thereof that binds to IL-6 and reduces IL-6 binding to its receptor(s).
59. The method of paragraph 58, wherein the IL-6 inhibitor antibody or antigen-binding fragment thereof is selected from Siltuximab, Olokizumab, Elsilimomab, mAb 1339, Sirukumab, Clazakizumab, ARGX-109, FM101, and C326.
60. The method of paragraph 57, wherein the IL-6 inhibitor is an IL-6 receptor antagonist.
61. The method of paragraph 60, wherein the IL-6 receptor antagonist is selected from tocilizumab, sarilumab, REGN88, FE301, and LMT-28.
62. The method of paragraph 57, wherein the IL-6 inhibitor is a small molecule or microRNA inhibitor.
63. The method of paragraph 62, wherein the small molecule IL-6 inhibitor is ALX-0061 or LMT-28.
64. The method of paragraph 63, wherein the IL-6 inhibitor is a JAK-STAT inhibitor.
65. The method of paragraph 64, wherein the JAK-STAT inhibitor is selected from baricitinib, decernotinid, filgotinib, INCB-039110, ruxolitinib, tofacitinib, Oclacitinib, Gandotinib, Lestaurtinib, Momelotinib, Pacritinib, PF-04965842, Upadacitinib, and Peficitinib.
66. The method of any one of paragraphs 37-65, wherein the inhibitor of HSC cardiometabolic driver gene mutation-mediated proinflammatory activity is a TNFα inhibitor.
67. The method of paragraph 66, wherein the TNFα inhibitor is a TNFα inhibitor antibody or antigen-binding fragment thereof that binds to TNFα and reduces TNFα binding to its receptor(s).
68. The method of paragraph 67, wherein the TNFα inhibitor antibody or antigen-binding fragment thereof is selected from adalimumab, Adalimumab-atto, certolizumab pegol, golimumab, infliximab,
69. The method of paragraph 66, wherein the TNFα inhibitor is a TNFα receptor antagonist.
70. The method of paragraph 69, wherein the TNFα receptor antagonist is etanercept.
71. The method of paragraph 66, wherein the TNFα inhibitor is a small molecule or microRNA inhibitor.
72. The method of any one of paragraphs 37-71, further comprising monitoring hematopoietic cell clonality, IL-1β proinflammatory activity, IL-6 proinflammatory activity, TNFα proinflammatory activity or any combination thereof following the administration of the inhibitor of HSC cardiometabolic driver gene mutation-mediated proinflammatory activity.
73. The method of any one of paragraphs 37-72, further comprising decreasing the number or percentage of hematopoietic cells comprising the one or more somatic mutations in the one or more HSC cardiometabolic driver genes in the subject by performing therapeutic cytapheresis on the subject.
74. The method of any one of paragraphs 37-73, further comprising administering one or more additional therapeutic agents to the subject.
75. The method of any one of paragraphs 37-74, wherein the HSC cardiometabolic driver gene mutation-mediated proinflammatory disease is a cardiometabolic disease or disorder.
76. The method of any one of paragraphs 37-74, wherein the HSC cardiometabolic driver gene mutation-mediated proinflammatory disease is a chronic kidney disease or disorder.
77. A pharmaceutical composition comprising an inhibitor of HSC cardiometabolic driver gene mutation-mediated proinflammatory activity and a pharmaceutically acceptable carrier for use in a subject having one or more somatic mutations in one or more HSC cardiometabolic driver genes in a sub-population of hematopoietic cells.
78. The pharmaceutical composition of paragraph 77, wherein the one or more somatic mutations in the one or more HSC cardiometabolic driver genes in the sub-population of hematopoietic cells cause clonal hematopoiesis in the subject.
79. The pharmaceutical composition of any one of paragraphs 77 or 78, wherein at least 2% of the hematopoietic cells in the subject have the one or more mutations in one or more HSC cardiometabolic driver genes.
80. The pharmaceutical composition of any one of paragraphs 77-79, wherein the one or more HSC cardiometabolic driver genes are selected from TP53, JAK2, DNMT3A, ASXL1, and PPM1D/WIP1.
81. The pharmaceutical composition of paragraph 80, wherein the one or more somatic mutations are in TP53 and are selected from a G743A mutation in SEQ ID NO:2 and a A659G mutation in SEQ ID NO: 2.
82. The pharmaceutical composition of any one of paragraphs 80 or 81, wherein the one or more somatic mutations are in JAK2 and is a G1849T in SEQ ID NO: 56.
83. The pharmaceutical composition of any one of paragraphs 80-82, wherein the one or more somatic mutations are in DNMT3A and are selected from a T1115C mutation in SEQ ID NO: 37; a C2711T mutation in SEQ ID NO: 37; a C1837G mutation in SEQ ID NO: 37; a A1666G mutation in SEQ ID NO: 37; a C1789T mutation in SEQ ID NO: 37; a G2719A mutation in SEQ ID NO: 37; a G1627T mutation in SEQ ID NO: 37; an A2723G mutation in SEQ ID NO: 37; a G1797T mutation in SEQ ID NO: 37; a T2252G mutation in SEQ ID NO: 37; a C1560A mutation in SEQ ID NO: 37; a T1031C mutation in SEQ ID NO: 37; a G2645A mutation in SEQ ID NO: 37; a C2043G mutation in SEQ ID NO: 37; a C2446T mutation in SEQ ID NO: 37; a A2198G mutation in SEQ ID NO: 37; A2281G mutation in SEQ ID NO: 37; a C920G mutation in SEQ ID NO: 37; a A2204G mutation in SEQ ID NO: 37; and a frameshift mutation in DNMT3A.
84. The pharmaceutical composition of any one of paragraphs 80-83, wherein the one or more somatic mutations are in ASXL1 and are selected from a C2407T mutation in SEQ ID NO: 61; a C2893T mutation in SEQ ID NO: 61; a 1926_1926delinsAG mutation in SEQ ID NO: 61; and a frameshift mutation in ASXL1.
85. The pharmaceutical composition of any one of paragraphs 80-84, wherein the one or more somatic mutations are in PPM1D and are selected from a G1618T mutation in SEQ ID NO: 64; a C1372T mutation in SEQ ID NO: 64; and a frameshift mutation in PPM1D.
86. The pharmaceutical composition of any one of paragraphs 77-85, wherein the subject further has one or more somatic mutations in TET2 in a sub-population of peripheral blood hematopoietic cells selected from an S282F mutation in SEQ ID NO: 68, an N312S mutation in SEQ ID NO: 68, an L346P mutation in SEQ ID NO: 68, an S460F mutation in SEQ ID NO: 68, a D666G mutation in SEQ ID NO: 68, a P941S mutation in SEQ ID NO: 68, and a C1135Y mutation in SEQ ID NO: 68.
87. The pharmaceutical composition of any one of paragraphs 77-86, wherein the inhibitor of HSC cardiometabolic driver gene mutation-mediated proinflammatory activity is an IL-1β inhibitor.
88. The pharmaceutical composition of paragraph 87, wherein the IL-1β inhibitor is an IL-1β inhibitor antibody or antigen-binding fragment thereof that binds to IL-1β and reduces IL-1β binding to its receptor(s).
89. The pharmaceutical composition of paragraph 88, wherein the IL-1β inhibitor antibody or antigen-binding fragment thereof is selected from ABT981, an anti-interleukin-11 inhibitor antibody by ABZYME, APX002, Canakinumab/Ilaris, CDP48, immunereszumab, LY2189102, MEDI8968, and XOMA052.
90. The pharmaceutical composition of paragraph 87, wherein the IL-1β inhibitor is an IL-1 receptor antagonist.
91. The pharmaceutical composition of paragraph 90, wherein the IL-1 receptor antagonist is selected from CDP484, CP412245, CYT013 IL1bQb, XL 130, AMG108, HL 2351, IL1Hyl, AXXO, orthokine, PRT 1000, anakinra, and rilonacept.
92. The pharmaceutical composition of paragraph 87, wherein the IL-1β inhibitor is a small molecule or microRNA inhibitor that inhibits IL-1β-mediated pro-inflammatory activity.
93. The pharmaceutical composition of paragraph 92, wherein the small molecule or microRNA inhibitor is selected from AC201, CP412245, MCC950 or CRID3, inflabion, inflammasome modulator OPSONA, PGE3935199, PGE527667, TRK530, β-hydroxybutyrate (BHB), and microRNA-223.
94. The pharmaceutical composition of paragraph 93, wherein the small molecule inhibitor is MCC950.
95. The pharmaceutical composition of any one of paragraphs 77-94, wherein the inhibitor of HSC cardiometabolic driver gene mutation-mediated proinflammatory activity is an IL-6 inhibitor.
96. The pharmaceutical composition of paragraph 95, wherein the IL-6 inhibitor is an IL-6 inhibitor antibody or antigen-binding fragment thereof that binds to IL-6 and reduces IL-6 binding to its receptor(s).
97. The pharmaceutical composition of paragraph 96, wherein the IL-6 inhibitor antibody or antigen-binding fragment thereof is selected from Siltuximab, Olokizumab, Elsilimomab, mAb 1339, Sirukumab, Clazakizumab, ARGX-109, FM101, and C326.
98. The pharmaceutical composition of paragraph 95, wherein the IL-6 inhibitor is an IL-6 receptor antagonist.
99. The pharmaceutical composition of paragraph 98, wherein the IL-6 receptor antagonist is selected from tocilizumab, sarilumab, REGN88, FE301, and LMT-28.
100. The pharmaceutical composition of paragraph 95, wherein the IL-6 inhibitor is a small molecule or microRNA inhibitor.
101. The pharmaceutical composition of paragraph 100, wherein the small molecule IL-6 inhibitor is ALX-0061 or LMT-28.
102. The pharmaceutical composition of paragraph 101, wherein the IL-6 inhibitor is a JAK-STAT inhibitor.
103. The pharmaceutical composition of paragraph 102, wherein the JAK-STAT inhibitor is selected from baricitinib, decernotinid, filgotinib, INCB-039110, ruxolitinib, tofacitinib, Oclacitinib, Gandotinib, Lestaurtinib, Momelotinib, Pacritinib, PF-04965842, Upadacitinib, and Peficitinib.
104. The pharmaceutical composition of any one of paragraphs 77-103, wherein the inhibitor of HSC cardiometabolic driver gene mutation-mediated proinflammatory activity is a TNFα inhibitor.
105. The pharmaceutical composition of paragraph 104, wherein the TNFα inhibitor is a TNFα inhibitor antibody or antigen-binding fragment thereof that binds to TNFα and reduces TNFα binding to its receptor(s).
106. The pharmaceutical composition of paragraph 105, wherein the TNFα inhibitor antibody or antigen-binding fragment thereof is selected from adalimumab, Adalimumab-atto, certolizumab pegol, golimumab, infliximab,
107. The pharmaceutical composition of paragraph 104, wherein the TNFα inhibitor is a TNFα receptor antagonist.
108. The pharmaceutical composition of paragraph 107, wherein the TNFα receptor antagonist is etanercept.
109. The pharmaceutical composition of paragraph 104, wherein the TNFα inhibitor is a small molecule or microRNA inhibitor.
110. The pharmaceutical composition of any one of paragraphs 77-109, wherein the HSC cardiometabolic driver gene mutation-mediated proinflammatory disease is a cardiometabolic disease or disorder.
111. The pharmaceutical composition of any one of paragraphs 77-109, wherein the HSC cardiometabolic driver gene mutation-mediated proinflammatory disease is a chronic kidney disease or disorder.
112. A method for detecting a subject having, or at risk for, a cardiometabolic driver gene mutation-mediated proinflammatory disease comprising:
[0345] (i) obtaining a hematopoietic cell sample from a subject, and
[0346] (ii) sequencing the hematopoietic cell sample from the subject to detect one or more somatic mutations in one or more HSC cardiometabolic driver genes in the hematopoietic cell sample.
   113. The method of paragraph 112, wherein the hematopoietic cell sample is a peripheral blood hematopoietic cell sample.
   114. The method of any one of paragraphs 112 or 113, wherein the hematopoietic cell sample is enriched for myeloid-derived cells.
   115. The method of any one of paragraphs 112-114, wherein the one or more somatic mutations in the one or more HSC cardiometabolic driver genes identified in the hematopoietic cell sample cause clonal hematopoiesis in the subject.
   116. The method of any one of paragraphs 112-115, wherein at least 2% of the hematopoietic cells are identified as having one or more HSC cardiometabolic driver gene mutations.
   117. The method of any one of paragraphs 112-116, wherein the one or more HSC cardiometabolic driver genes are selected from TP53, JAK2, DNMT3A, ASXL1, and PPM1D/WIP1.
   118. The method of paragraph 117, wherein the one or more somatic mutations are in TP53 and are selected from a G743A mutation in SEQ ID NO:2 and a A659G mutation in SEQ ID NO: 2.
   119. The method of any one of paragraphs 117 or 118, wherein the one or more somatic mutations are in JAK2 and is a G1849T in SEQ ID NO: 56.
   120. The method of any one of paragraphs 117-119, wherein the one or more somatic mutations are in DNMT3A and are selected from a T1115C mutation in SEQ ID NO: 37; a C2711T mutation in SEQ ID NO: 37; a C1837G mutation in SEQ ID NO: 37; a A1666G mutation in SEQ ID NO: 37; a C1789T mutation in SEQ ID NO: 37; a G2719A mutation in SEQ ID NO: 37; a G1627T mutation in SEQ ID NO: 37; an A2723G mutation in SEQ ID NO: 37; a G1797T mutation in SEQ ID NO: 37; a T2252G mutation in SEQ ID NO: 37; a C1560A mutation in SEQ ID NO: 37; a T1031C mutation in SEQ ID NO: 37; a G2645A mutation in SEQ ID NO: 37; a C2043G mutation in SEQ ID NO: 37; a C2446T mutation in SEQ ID NO: 37; a A2198G mutation in SEQ ID NO: 37; A2281G mutation in SEQ ID NO: 37; a C920G mutation in SEQ ID NO: 37; a A2204G mutation in SEQ ID NO: 37; and a frameshift mutation in DNMT3A.
   121. The method of any one of paragraphs 117-120, wherein the one or more somatic mutations are in ASXL1 and are selected from a C2407T mutation in SEQ ID NO: 61; a C2893T mutation in SEQ ID NO: 61; a 1926_1926delinsAG mutation in SEQ ID NO: 61; and a frameshift mutation in ASXL1.
   122. The method of any one of paragraphs 117-121, wherein the one or more somatic mutations are in PPM1D and are selected from a G1618T mutation in SEQ ID NO: 64; a C1372T mutation in SEQ ID NO: 64; and a frameshift mutation in PPM1D.
   123. The method of any one of paragraphs 117-122, wherein the subject further has one or more somatic mutations in TET2 in a sub-population of peripheral blood hematopoietic cells selected from an S282F mutation in SEQ ID NO: 68, an N312S mutation in SEQ ID NO: 68, an L346P mutation in SEQ ID NO: 68, an S460F mutation in SEQ ID NO: 68, a D666G mutation in SEQ ID NO: 68, a P941S mutation in SEQ ID NO: 68, and a C1135Y mutation in SEQ ID NO: 68.
   124. The method of any one of paragraphs 117-123, further comprising administering a therapeutically effective amount of a pharmaceutical composition comprising an inhibitor of HSC cardiometabolic driver gene mutation-mediated proinflammatory activity and a pharmaceutically acceptable carrier if one or more somatic mutations in one or more HSC cardiometabolic driver genes are identified in the hematopoietic cell sample.
   125. The method of paragraph 124, wherein the inhibitor of HSC cardiometabolic driver gene mutation-mediated proinflammatory activity is an IL-1β inhibitor.
   126. The method of paragraph 125, wherein the IL-1β inhibitor is an IL-1β inhibitor antibody or antigen-binding fragment thereof that binds to IL-1β and reduces IL-1β binding to its receptor(s).
   127. The method of paragraph 126, wherein the IL-1β inhibitor antibody or antigen-binding fragment thereof is selected from ABT981, an anti-interleukin-1β inhibitor antibody by ABZYME, APX002, Canakinumab/Ilaris, CDP48, immunereszumab, LY2189102, MEDI8968, and XOMA052.
   128. The method of paragraph 125, wherein the IL-1β inhibitor is an IL-1 receptor antagonist.
   129. The method of paragraph 128, wherein the IL-1 receptor antagonist is selected from CDP484, CP412245, CYT013 IL1bQb, XL 130, AMG108, HL 2351, IL1Hyl, AXXO, orthokine, PRT 1000, anakinra, and rilonacept.
   130. The method of paragraph 125, wherein the IL-1β inhibitor is a small molecule or microRNA inhibitor that inhibits IL-1β-mediated pro-inflammatory activity.
   131. The method of paragraph 130, wherein the small molecule or microRNA inhibitor is selected from AC201, CP412245, MCC950 or CRID3, inflabion, inflammasome modulator OPSONA, PGE3935199, PGE527667, TRK530, β-hydroxybutyrate (BHB), and microRNA-223.
   132. The method of paragraph 131, wherein the small molecule inhibitor is MCC950.
   133. The method of any one of paragraphs 124-132, wherein the inhibitor of HSC cardiometabolic driver gene mutation-mediated proinflammatory activity is an IL-6 inhibitor.
   134. The method of paragraph 133, wherein the IL-6 inhibitor is an IL-6 inhibitor antibody or antigen-binding fragment thereof that binds to IL-6 and reduces IL-6 binding to its receptor(s).
   135. The method of paragraph 134, wherein the IL-6 inhibitor antibody or antigen-binding fragment thereof is selected from Siltuximab, Olokizumab, Elsilimomab, mAb 1339, Sirukumab, Clazakizumab, ARGX-109, FM101, and C326.
   136. The method of paragraph 133, wherein the IL-6 inhibitor is an IL-6 receptor antagonist.
   137. The method of paragraph 136, wherein the IL-6 receptor antagonist is selected from tocilizumab, sarilumab, REGN88, FE301, and LMT-28.
   138. The method of paragraph 133, wherein the IL-6 inhibitor is a small molecule or microRNA inhibitor.
   139. The method of paragraph 138, wherein the small molecule IL-6 inhibitor is ALX-0061 or LMT-28.
   140. The method of paragraph 133, wherein the IL-6 inhibitor is a JAK-STAT inhibitor.
   141. The method of paragraph 140, wherein the JAK-STAT inhibitor is selected from baricitinib, decernotinid, filgotinib, INCB-039110, ruxolitinib, tofacitinib, Oclacitinib, Gandotinib, Lestaurtinib, Momelotinib, Pacritinib, PF-04965842, Upadacitinib, and Peficitinib.
   142. The method of any one of paragraphs 124-141, wherein the inhibitor of HSC cardiometabolic driver gene mutation-mediated proinflammatory activity is a TNFα inhibitor.
   143. The method of paragraph 142, wherein the TNFα inhibitor is a TNFα inhibitor antibody or antigen-binding fragment thereof that binds to TNFα and reduces TNFα binding to its receptor(s).
   144. The method of paragraph 143, wherein the TNFα inhibitor antibody or antigen-binding fragment thereof is selected from adalimumab, Adalimumab-atto, certolizumab pegol, golimumab, infliximab,
   145. The method of paragraph 142, wherein the TNFα inhibitor is a TNFα receptor antagonist.
   146. The method of paragraph 145, wherein the TNFα receptor antagonist is etanercept.
   147. The method of paragraph 142, wherein the TNFα inhibitor is a small molecule or microRNA inhibitor.
   148. The method of any one of paragraphs 124-147, further comprising monitoring hematopoietic cell clonality, IL-1β proinflammatory activity, IL-6 proinflammatory activity, TNFα proinflammatory activity or any combination thereof following the administration of the inhibitor of HSC cardiometabolic driver gene mutation-mediated proinflammatory activity.
   149. The method of any one of paragraphs 124-148, further comprising decreasing the number or percentage of hematopoietic cells comprising the one or more somatic mutations in the one or more HSC cardiometabolic driver genes in the subject by performing therapeutic cytapheresis on the subject.
   150. The method of any one of paragraphs 124-149, further comprising administering one or more additional therapeutic agents to the subject.
   151. The method of any one of paragraphs 112-150, wherein the HSC cardiometabolic driver gene mutation-mediated proinflammatory disease is a cardiometabolic disease or disorder.
   152. The method of any one of paragraphs 112-150, wherein the HSC cardiometabolic driver gene mutation-mediated proinflammatory disease is a chronic kidney disease or disorder.

[0347] Some embodiments of the technology described herein can be defined according to any of the following numbered paragraphs:

1. A method for treating a subject having, or at risk for, a HSC (hematopoietic stem cell) cardiometabolic driver gene mutation-mediated proinflammatory disease comprising: administering a therapeutically effective amount of a pharmaceutical composition comprising an inhibitor of HSC cardiometabolic driver gene mutation-mediated proinflammatory activity and a pharmaceutically acceptable carrier to a subject having one or more somatic mutations in one or more HSC cardiometabolic driver gene in a sub-population of peripheral blood hematopoietic cells.
2. The method of paragraph 1, wherein the one or more somatic mutations in the one or more HSC cardiometabolic driver genes in the sub-population of peripheral blood hematopoietic cells cause clonal hematopoiesis in the subject.
3. The method of any one of paragraphs 1 or 2, wherein at least 2% of the peripheral blood hematopoietic cells have the one or more somatic mutations in the one or more HSC cardiometabolic driver genes.
4. The method of any one of paragraphs 1-3, wherein the one or more HSC cardiometabolic driver genes are selected from TP53, JAK2, DNMT3A, ASXL1, TET2, and PPM1D/WIP1.
5. The method of paragraph 4, wherein the one or more somatic mutations are in TP53 and are selected from a G743A mutation in SEQ ID NO:2 and a A659G mutation in SEQ ID NO: 2.
6. The method of any one of paragraphs 4 or 5, wherein the one or more somatic mutations are in JAK2 and is a G1849T in SEQ ID NO: 56.
7. The method of any one of paragraphs 4-6, wherein the one or more somatic mutations are in DNMT3A and are selected from a T1115C mutation in SEQ ID NO: 37; a C2711T mutation in SEQ ID NO: 37; a C1837G mutation in SEQ ID NO: 37; a A1666G mutation in SEQ ID NO: 37; a C1789T mutation in SEQ ID NO: 37; a G2719A mutation in SEQ ID NO: 37; a G1627T mutation in SEQ ID NO: 37; an A2723G mutation in SEQ ID NO: 37; a G1797T mutation in SEQ ID NO: 37; a T2252G mutation in SEQ ID NO: 37; a C1560A mutation in SEQ ID NO: 37; a T1031C mutation in SEQ ID NO: 37; a G2645A mutation in SEQ ID NO: 37; a C2043G mutation in SEQ ID NO: 37; a C2446T mutation in SEQ ID NO: 37; a A2198G mutation in SEQ ID NO: 37; A2281G mutation in SEQ ID NO: 37; a C920G mutation in SEQ ID NO: 37; a A2204G mutation in SEQ ID NO: 37; and a frameshift mutation in DNMT3A.
8. The method of any one of paragraphs 4-7, wherein the one or more somatic mutations are in ASXL1 and are selected from a C2407T mutation in SEQ ID NO: 61; a C2893T mutation in SEQ ID NO: 61; a 1926_1926delinsAG mutation in SEQ ID NO: 61; and a frameshift mutation in ASXL1.
9. The method of any one of paragraphs 4-8, wherein the one or more somatic mutations are in PPM1D and are selected from a G1618T mutation in SEQ ID NO: 64; a C1372T mutation in SEQ ID NO: 64; and a frameshift mutation in PPM1D.
10. The method of any one of paragraphs 4-8, wherein one or more somatic mutations are in TET2 and are selected from an S282F mutation in SEQ ID NO: 68, an N312S mutation in SEQ ID NO: 68, an L346P mutation in SEQ ID NO: 68, an S460F mutation in SEQ ID NO: 68, a D666G mutation in SEQ ID NO: 68, a P941S mutation in SEQ ID NO: 68, and a C1135Y mutation in SEQ ID NO: 68.
11. The method of any one of paragraphs 1-9, wherein the subject further has one or more somatic mutations in TET2 in a sub-population of peripheral blood hematopoietic cells selected from an S282F mutation in SEQ ID NO: 68, an N312S mutation in SEQ ID NO: 68, an L346P mutation in SEQ ID NO: 68, an S460F mutation in SEQ ID NO: 68, a D666G mutation in SEQ ID NO: 68, a P941S mutation in SEQ ID NO: 68, and a C1135Y mutation in SEQ ID NO: 68.
12. The method of any one of paragraphs 1-11, wherein the inhibitor of HSC cardiometabolic driver gene mutation-mediated proinflammatory activity is an IL-1β inhibitor.
13. The method of paragraph 12, wherein the IL-1β inhibitor is an IL-1β inhibitor antibody or antigen-binding fragment thereof that binds to IL-1β and reduces IL-1β binding to its receptor(s).
14. The method of paragraph 13, wherein the IL-1β inhibitor antibody or antigen-binding fragment thereof is selected from ABT981, an anti-interleukin-1J inhibitor antibody by ABZYME, APX002, Canakinumab/Ilaris, CDP48, immunereszumab, LY2189102, MEDI8968, and XOMA052.
15. The method of paragraph 12, wherein the IL-1β inhibitor is an IL-1 receptor antagonist.
16. The method of paragraph 15, wherein the IL-1 receptor antagonist is selected from CDP484, CP412245, CYT013 IL1bQb, XL 130, AMG108, HL 2351, IL1Hyl, AXXO, orthokine, PRT 1000, anakinra, and rilonacept.
17. The method of paragraph 12, wherein the IL-1β inhibitor is a small molecule or microRNA inhibitor that inhibits IL-1β-mediated pro-inflammatory activity.
18. The method of paragraph 17, wherein the small molecule or microRNA inhibitor is selected from AC201, CP412245, MCC950 or CRID3, inflabion, inflammasome modulator OPSONA, PGE3935199, PGE527667, TRK530, β-hydroxybutyrate (BHB), and microRNA-223.
19. The method of paragraph 18, wherein the small molecule inhibitor is MCC950.
20. The method of any one of paragraphs 1-19, wherein the inhibitor of HSC cardiometabolic driver gene mutation-mediated proinflammatory activity is an IL-6 inhibitor.
21. The method of paragraph 20, wherein the IL-6 inhibitor is an IL-6 inhibitor antibody or antigen-binding fragment thereof that binds to IL-6 and reduces IL-6 binding to its receptor(s).
22. The method of paragraph 21, wherein the IL-6 inhibitor antibody or antigen-binding fragment thereof is selected from Siltuximab, Olokizumab, Elsilimomab, mAb 1339, Sirukumab, Clazakizumab, ARGX-109, FM101, and C326.
23. The method of paragraph 20, wherein the IL-6 inhibitor is an IL-6 receptor antagonist.
24. The method of paragraph 23, wherein the IL-6 receptor antagonist is selected from tocilizumab, sarilumab, REGN88, FE301, and LMT-28.
25. The method of paragraph 20, wherein the IL-6 inhibitor is a small molecule or microRNA inhibitor.
26. The method of paragraph 25, wherein the small molecule IL-6 inhibitor is ALX-0061 or LMT-28.
27. The method of paragraph 20, wherein the IL-6 inhibitor is a JAK-STAT inhibitor.
28. The method of paragraph 27, wherein the JAK-STAT inhibitor is selected from baricitinib, decernotinid, filgotinib, INCB-039110, ruxolitinib, tofacitinib, Oclacitinib, Gandotinib, Lestaurtinib, Momelotinib, Pacritinib, PF-04965842, Upadacitinib, and Peficitinib.
29. The method of any one of paragraphs 1-28, wherein the inhibitor of HSC cardiometabolic driver gene mutation-mediated proinflammatory activity is a TNFα inhibitor.
30. The method of paragraph 29, wherein the TNFα inhibitor is a TNFα inhibitor antibody or antigen-binding fragment thereof that binds to TNFα and reduces TNFα binding to its receptor(s).
31. The method of paragraph 30, wherein the TNFα inhibitor antibody or antigen-binding fragment thereof is selected from adalimumab, Adalimumab-atto, certolizumab pegol, golimumab, infliximab,
32. The method of paragraph 29, wherein the TNFα inhibitor is a TNFα receptor antagonist.
33. The method of paragraph 32, wherein the TNFα receptor antagonist is etanercept.
34. The method of paragraph 29, wherein the TNFα inhibitor is a small molecule or microRNA inhibitor.
35. The method of any one of paragraphs 1-34, further comprising monitoring hematopoietic cell clonality, IL-1β proinflammatory activity, IL-6 proinflammatory activity, TNFα proinflammatory activity or any combination thereof following the administration of the inhibitor of HSC cardiometabolic driver gene mutation-mediated proinflammatory activity.
36. The method of any one of paragraphs 1-35, further comprising decreasing the number or percentage of hematopoietic cells comprising the one or more somatic mutations in the one or more HSC cardiometabolic driver genes in the subject by performing therapeutic cytapheresis on the subject.
37. The method of any one of paragraphs 1-36, further comprising administering one or more additional therapeutic agents to the subject.
38. A method for treating a subject having, or at risk for, a HSC cardiometabolic driver gene mutation-mediated proinflammatory disease comprising:

[0348] (a) sequencing a hematopoietic cell sample from a subject to identify one or more somatic mutations in one or more HSC cardiometabolic driver genes in the hematopoietic cell sample; and

[0349] (b) administering a therapeutically effective amount of a pharmaceutical composition comprising an inhibitor of HSC cardiometabolic driver gene mutation-mediated proinflammatory activity and a pharmaceutically acceptable carrier if one or more somatic mutations in one or more HSC cardiometabolic driver genes are identified in the hematopoietic cell sample.

39. The method of paragraph 38, wherein the hematopoietic cell sample is a peripheral blood hematopoietic cell sample.
40. The method of any one of paragraphs 38 or 39, wherein the hematopoietic cell sample is enriched for myeloid-derived cells.
41. The method of any one of paragraphs 38-40, wherein the one or more somatic mutations in the one or more HSC cardiometabolic driver genes identified in the hematopoietic cell sample cause clonal hematopoiesis in the subject.
42. The method of any one of paragraphs 38-41, wherein at least 2% of the hematopoietic cells are identified as having one or more HSC cardiometabolic driver gene mutations.
43. The method of any one of paragraphs 38-42, wherein the one or more HSC cardiometabolic driver genes are selected from TP53, JAK2, DNMT3A, ASXL1, TET2 and PPM1D/WIP1.
44. The method of paragraph 43, wherein the one or more somatic mutations are in TP53 and are selected from a G743A mutation in SEQ ID NO:2 and a A659G mutation in SEQ ID NO: 2.
45. The method of any one of paragraphs 43 or 44, wherein the one or more somatic mutations are in JAK2 and is a G1849T in SEQ ID NO: 56.
46. The method of any one of paragraphs 43-45, wherein the one or more somatic mutations are in DNMT3A and are selected from a T1115C mutation in SEQ ID NO: 37; a C2711T mutation in SEQ ID NO: 37; a C1837G mutation in SEQ ID NO: 37; a A1666G mutation in SEQ ID NO: 37; a C1789T mutation in SEQ ID NO: 37; a G2719A mutation in SEQ ID NO: 37; a G1627T mutation in SEQ ID NO: 37; an A2723G mutation in SEQ ID NO: 37; a G1797T mutation in SEQ ID NO: 37; a T2252G mutation in SEQ ID NO: 37; a C1560A mutation in SEQ ID NO: 37; a T1031C mutation in SEQ ID NO: 37; a G2645A mutation in SEQ ID NO: 37; a C2043G mutation in SEQ ID NO: 37; a C2446T mutation in SEQ ID NO: 37; a A2198G mutation in SEQ ID NO: 37; A2281G mutation in SEQ ID NO: 37; a C920G mutation in SEQ ID NO: 37; a A2204G mutation in SEQ ID NO: 37; and a frameshift mutation in DNMT3A.
47. The method of any one of paragraphs 43-46, wherein the one or more somatic mutations are in ASXL1 and are selected from a C2407T mutation in SEQ ID NO: 61; a C2893T mutation in SEQ ID NO: 61; a 1926_1926delinsAG mutation in SEQ ID NO: 61; and a frameshift mutation in ASXL1.
48. The method of any one of paragraphs 43-47, wherein the one or more somatic mutations are in PPM1D and are selected from a G1618T mutation in SEQ ID NO: 64; a C1372T mutation in SEQ ID NO: 64; and a frameshift mutation in PPM1D.
49. The method of any one of paragraphs 43-48, wherein one or more somatic mutations are in TET2 and are selected from an S282F mutation in SEQ ID NO: 68, an N312S mutation in SEQ ID NO: 68, an L346P mutation in SEQ ID NO: 68, an S460F mutation in SEQ ID NO: 68, a D666G mutation in SEQ ID NO: 68, a P941S mutation in SEQ ID NO: 68, and a C1135Y mutation in SEQ ID NO: 68.
50. The method of any one of paragraphs 38-49, wherein the subject further has one or more somatic mutations in TET2 in a sub-population of peripheral blood hematopoietic cells selected from an S282F mutation in SEQ ID NO: 68, an N312S mutation in SEQ ID NO: 68, an L346P mutation in SEQ ID NO: 68, an S460F mutation in SEQ ID NO: 68, a D666G mutation in SEQ ID NO: 68, a P941S mutation in SEQ ID NO: 68, and a C1135Y mutation in SEQ ID NO: 68.
51. The method of any one of paragraphs 38-49, wherein the inhibitor of HSC cardiometabolic driver gene mutation-mediated proinflammatory activity is an IL-1β inhibitor.
52. The method of paragraph 51, wherein the IL-1β inhibitor is an IL-1β inhibitor antibody or antigen-binding fragment thereof that binds to IL-1β and reduces IL-1β binding to its receptor(s).
53. The method of paragraph 52, wherein the IL-1β inhibitor antibody or antigen-binding fragment thereof is selected from ABT981, an anti-interleukin-11 inhibitor antibody by ABZYME, APX002, Canakinumab/Ilaris, CDP48, immunereszumab, LY2189102, MEDI8968, and XOMA052.
54. The method of paragraph 51, wherein the IL-1β inhibitor is an IL-1 receptor antagonist.
55. The method of paragraph 54, wherein the IL-1 receptor antagonist is selected from CDP484, CP412245, CYT013 IL1bQb, XL 130, AMG108, HL 2351, IL1Hyl, AXXO, orthokine, PRT 1000, anakinra, and rilonacept.
56. The method of paragraph 51, wherein the IL-1β inhibitor is a small molecule or microRNA inhibitor that inhibits IL-1β-mediated pro-inflammatory activity.
57. The method of paragraph 56, wherein the small molecule or microRNA inhibitor is selected from AC201, CP412245, MCC950 or CRID3, inflabion, inflammasome modulator OPSONA, PGE3935199, PGE527667, TRK530, J-hydroxybutyrate (BHB), and microRNA-223.
58. The method of paragraph 57, wherein the small molecule inhibitor is MCC950.
59. The method of any one of paragraphs 38-58, wherein the inhibitor of HSC cardiometabolic driver gene mutation-mediated proinflammatory activity is an IL-6 inhibitor.
60. The method of paragraph 59, wherein the IL-6 inhibitor is an IL-6 inhibitor antibody or antigen-binding fragment thereof that binds to IL-6 and reduces IL-6 binding to its receptor(s).
61. The method of paragraph 60, wherein the IL-6 inhibitor antibody or antigen-binding fragment thereof is selected from Siltuximab, Olokizumab, Elsilimomab, mAb 1339, Sirukumab, Clazakizumab, ARGX-109, FM101, and C326.
62. The method of paragraph 59, wherein the IL-6 inhibitor is an IL-6 receptor antagonist.
63. The method of paragraph 62, wherein the IL-6 receptor antagonist is selected from tocilizumab, sarilumab, REGN88, FE301, and LMT-28.
64. The method of paragraph 59, wherein the IL-6 inhibitor is a small molecule or microRNA inhibitor.
65. The method of paragraph 64, wherein the small molecule IL-6 inhibitor is ALX-0061 or LMT-28.
66. The method of paragraph 65, wherein the IL-6 inhibitor is a JAK-STAT inhibitor.
67. The method of paragraph 66, wherein the JAK-STAT inhibitor is selected from baricitinib, decernotinid, filgotinib, INCB-039110, ruxolitinib, tofacitinib, Oclacitinib, Gandotinib, Lestaurtinib, Momelotinib, Pacritinib, PF-04965842, Upadacitinib, and Peficitinib.
68. The method of any one of paragraphs 38-67, wherein the inhibitor of HSC cardiometabolic driver gene mutation-mediated proinflammatory activity is a TNFα inhibitor.
69. The method of paragraph 68, wherein the TNFα inhibitor is a TNFα inhibitor antibody or antigen-binding fragment thereof that binds to TNFα and reduces TNFα binding to its receptor(s).
70. The method of paragraph 69, wherein the TNFα inhibitor antibody or antigen-binding fragment thereof is selected from adalimumab, Adalimumab-atto, certolizumab pegol, golimumab, infliximab,
71. The method of paragraph 68, wherein the TNFα inhibitor is a TNFα receptor antagonist.
72. The method of paragraph 71, wherein the TNFα receptor antagonist is etanercept.
73. The method of paragraph 68, wherein the TNFα inhibitor is a small molecule or microRNA inhibitor.
74. The method of any one of paragraphs 38-73, further comprising monitoring hematopoietic cell clonality, IL-1β proinflammatory activity, IL-6 proinflammatory activity, TNFα proinflammatory activity or any combination thereof following the administration of the inhibitor of HSC cardiometabolic driver gene mutation-mediated proinflammatory activity.
75. The method of any one of paragraphs 38-74, further comprising decreasing the number or percentage of hematopoietic cells comprising the one or more somatic mutations in the one or more HSC cardiometabolic driver genes in the subject by performing therapeutic cytapheresis on the subject.
76. The method of any one of paragraphs 38-75, further comprising administering one or more additional therapeutic agents to the subject.
77. The method of any one of paragraphs 1-76, wherein the HSC cardiometabolic driver gene mutation-mediated proinflammatory disease is a cardiometabolic disease or disorder.
78. The method of any one of paragraphs 1-76, wherein the HSC cardiometabolic driver gene mutation-mediated proinflammatory disease is a chronic kidney disease or disorder.
79. A pharmaceutical composition comprising an inhibitor of HSC cardiometabolic driver gene mutation-mediated proinflammatory activity and a pharmaceutically acceptable carrier for use in a subject having one or more somatic mutations in one or more HSC cardiometabolic driver genes in a sub-population of hematopoietic cells.
80. The pharmaceutical composition of paragraph 79, wherein the one or more somatic mutations in the one or more HSC cardiometabolic driver genes in the sub-population of hematopoietic cells cause clonal hematopoiesis in the subject.
81. The pharmaceutical composition of any one of paragraphs 79 or 80, wherein at least 2% of the hematopoietic cells in the subject have the one or more mutations in one or more HSC cardiometabolic driver genes.
82. The pharmaceutical composition of any one of paragraphs 79-81, wherein the one or more HSC cardiometabolic driver genes are selected from TP53, JAK2, DNMT3A, ASXL1, TET2, and PPM1D/WIP1.
83. The pharmaceutical composition of paragraph 82, wherein the one or more somatic mutations are in TP53 and are selected from a G743A mutation in SEQ ID NO:2 and a A659G mutation in SEQ ID NO: 2.
84. The pharmaceutical composition of any one of paragraphs 82 or 83, wherein the one or more somatic mutations are in JAK2 and is a G1849T in SEQ ID NO: 56.
85. The pharmaceutical composition of any one of paragraphs 82-84, wherein the one or more somatic mutations are in DNMT3A and are selected from a T1115C mutation in SEQ ID NO: 37; a C2711T mutation in SEQ ID NO: 37; a C1837G mutation in SEQ ID NO: 37; a A1666G mutation in SEQ ID NO: 37; a C1789T mutation in SEQ ID NO: 37; a G2719A mutation in SEQ ID NO: 37; a G1627T mutation in SEQ ID NO: 37; an A2723G mutation in SEQ ID NO: 37; a G1797T mutation in SEQ ID NO: 37; a T2252G mutation in SEQ ID NO: 37; a C1560A mutation in SEQ ID NO: 37; a T1031C mutation in SEQ ID NO: 37; a G2645A mutation in SEQ ID NO: 37; a C2043G mutation in SEQ ID NO: 37; a C2446T mutation in SEQ ID NO: 37; a A2198G mutation in SEQ ID NO: 37; A2281G mutation in SEQ ID NO: 37; a C920G mutation in SEQ ID NO: 37; a A2204G mutation in SEQ ID NO: 37; and a frameshift mutation in DNMT3A.
86. The pharmaceutical composition of any one of paragraphs 82-85, wherein the one or more somatic mutations are in ASXL1 and are selected from a C2407T mutation in SEQ ID NO: 61; a C2893T mutation in SEQ ID NO: 61; a 1926_1926delinsAG mutation in SEQ ID NO: 61; and a frameshift mutation in ASXL1.
87. The pharmaceutical composition of any one of paragraphs 82-86, wherein the one or more somatic mutations are in PPM1D and are selected from a G1618T mutation in SEQ ID NO: 64; a C1372T mutation in SEQ ID NO: 64; and a frameshift mutation in PPM1D.
88. The pharmaceutical composition of any one of paragraphs 82-87, wherein the one or more somatic mutations are in TET2 and are selected from an S282F mutation in SEQ ID NO: 68, an N312S mutation in SEQ ID NO: 68, an L346P mutation in SEQ ID NO: 68, an S460F mutation in SEQ ID NO: 68, a D666G mutation in SEQ ID NO: 68, a P941S mutation in SEQ ID NO: 68, and a C1135Y mutation in SEQ ID NO: 68.
89. The pharmaceutical composition of any one of paragraphs 82-87, wherein the subject further has one or more somatic mutations in TET2 in a sub-population of peripheral blood hematopoietic cells selected from an S282F mutation in SEQ ID NO: 68, an N312S mutation in SEQ ID NO: 68, an L346P mutation in SEQ ID NO: 68, an S460F mutation in SEQ ID NO: 68, a D666G mutation in SEQ ID NO: 68, a P941S mutation in SEQ ID NO: 68, and a C1135Y mutation in SEQ ID NO: 68.
90. The pharmaceutical composition of any one of paragraphs 79-89, wherein the inhibitor of HSC cardiometabolic driver gene mutation-mediated proinflammatory activity is an IL-1β inhibitor.
91. The pharmaceutical composition of paragraph 90, wherein the IL-1β inhibitor is an IL-1β inhibitor antibody or antigen-binding fragment thereof that binds to IL-1β and reduces IL-1β binding to its receptor(s).
92. The pharmaceutical composition of paragraph 91, wherein the IL-1β inhibitor antibody or antigen-binding fragment thereof is selected from ABT981, an anti-interleukin-1β inhibitor antibody by ABZYME, APX002, Canakinumab/Ilaris, CDP48, immunereszumab, LY2189102, MEDI8968, and XOMA052.
93. The pharmaceutical composition of paragraph 90, wherein the IL-1β inhibitor is an IL-1 receptor antagonist.
94. The pharmaceutical composition of paragraph 93, wherein the IL-1 receptor antagonist is selected from CDP484, CP412245, CYT013 IL1bQb, XL 130, AMG108, HL 2351, IL1Hyl, AXXO, orthokine, PRT 1000, anakinra, and rilonacept.
95. The pharmaceutical composition of paragraph 90, wherein the IL-1β inhibitor is a small molecule or microRNA inhibitor that inhibits IL-1β-mediated pro-inflammatory activity.
96. The pharmaceutical composition of paragraph 95, wherein the small molecule or microRNA inhibitor is selected from AC201, CP412245, MCC950 or CRID3, inflabion, inflammasome modulator OPSONA, PGE3935199, PGE527667, TRK530, β-hydroxybutyrate (BHB), and microRNA-223.
97. The pharmaceutical composition of paragraph 96, wherein the small molecule inhibitor is MCC950.
98. The pharmaceutical composition of any one of paragraphs 79-97, wherein the inhibitor of HSC cardiometabolic driver gene mutation-mediated proinflammatory activity is an IL-6 inhibitor.
99. The pharmaceutical composition of paragraph 98, wherein the IL-6 inhibitor is an IL-6 inhibitor antibody or antigen-binding fragment thereof that binds to IL-6 and reduces IL-6 binding to its receptor(s).
100. The pharmaceutical composition of paragraph 99, wherein the IL-6 inhibitor antibody or antigen-binding fragment thereof is selected from Siltuximab, Olokizumab, Elsilimomab, mAb 1339, Sirukumab, Clazakizumab, ARGX-109, FM101, and C326.
101. The pharmaceutical composition of paragraph 98, wherein the IL-6 inhibitor is an IL-6 receptor antagonist.
102. The pharmaceutical composition of paragraph 101, wherein the IL-6 receptor antagonist is selected from tocilizumab, sarilumab, REGN88, FE301, and LMT-28.
103. The pharmaceutical composition of paragraph 98, wherein the IL-6 inhibitor is a small molecule or microRNA inhibitor.
104. The pharmaceutical composition of paragraph 103, wherein the small molecule IL-6 inhibitor is ALX-0061 or LMT-28.
105. The pharmaceutical composition of paragraph 104, wherein the IL-6 inhibitor is a JAK-STAT inhibitor.
106. The pharmaceutical composition of paragraph 105, wherein the JAK-STAT inhibitor is selected from baricitinib, decernotinid, filgotinib, INCB-039110, ruxolitinib, tofacitinib, Oclacitinib, Gandotinib, Lestaurtinib, Momelotinib, Pacritinib, PF-04965842, Upadacitinib, and Peficitinib.
107. The pharmaceutical composition of any one of paragraphs 79-106, wherein the inhibitor of HSC cardiometabolic driver gene mutation-mediated proinflammatory activity is a TNFα inhibitor.
108. The pharmaceutical composition of paragraph 107, wherein the TNFα inhibitor is a TNFα inhibitor antibody or antigen-binding fragment thereof that binds to TNFα and reduces TNFα binding to its receptor(s).
109. The pharmaceutical composition of paragraph 108, wherein the TNFα inhibitor antibody or antigen-binding fragment thereof is selected from adalimumab, Adalimumab-atto, certolizumab pegol, golimumab, infliximab,
110. The pharmaceutical composition of paragraph 107, wherein the TNFα inhibitor is a TNFα receptor antagonist.
111. The pharmaceutical composition of paragraph 1110, wherein the TNFα receptor antagonist is etanercept.
112. The pharmaceutical composition of paragraph 107, wherein the TNFα inhibitor is a small molecule or microRNA inhibitor.
113. The pharmaceutical composition of any one of paragraphs 79-112, wherein the HSC cardiometabolic driver gene mutation-mediated proinflammatory disease is a cardiometabolic disease or disorder.
114. The pharmaceutical composition of any one of paragraphs 79-112, wherein the HSC cardiometabolic driver gene mutation-mediated proinflammatory disease is a chronic kidney disease or disorder.
115. A method for detecting a subject having, or at risk for, a cardiometabolic driver gene mutation-mediated proinflammatory disease comprising:
[0350] (iii) obtaining a hematopoietic cell sample from a subject, and
[0351] (iv) sequencing the hematopoietic cell sample from the subject to detect one or more somatic mutations in one or more HSC cardiometabolic driver genes in the hematopoietic cell sample.
   116. The method of paragraph 115, wherein the hematopoietic cell sample is a peripheral blood hematopoietic cell sample.
   117. The method of any one of paragraphs 115 or 116, wherein the hematopoietic cell sample is enriched for myeloid-derived cells.
   118. The method of any one of paragraphs 115-117, wherein the one or more somatic mutations in the one or more HSC cardiometabolic driver genes identified in the hematopoietic cell sample cause clonal hematopoiesis in the subject.
   119. The method of any one of paragraphs 115-118, wherein at least 2% of the hematopoietic cells are identified as having one or more HSC cardiometabolic driver gene mutations.
   120. The method of any one of paragraphs 115-119, wherein the one or more HSC cardiometabolic driver genes are selected from TP53, JAK2, DNMT3A, ASXL1, TET2, and PPM1D/WIP1.
   121. The method of paragraph 120, wherein the one or more somatic mutations are in TP53 and are selected from a G743A mutation in SEQ ID NO:2 and a A659G mutation in SEQ ID NO: 2.
   122. The method of any one of paragraphs 120 or 121, wherein the one or more somatic mutations are in JAK2 and is a G1849T in SEQ ID NO: 56.
   123. The method of any one of paragraphs 120-121, wherein the one or more somatic mutations are in DNMT3A and are selected from a T1115C mutation in SEQ ID NO: 37; a C2711T mutation in SEQ ID NO: 37; a C1837G mutation in SEQ ID NO: 37; a A1666G mutation in SEQ ID NO: 37; a C1789T mutation in SEQ ID NO: 37; a G2719A mutation in SEQ ID NO: 37; a G1627T mutation in SEQ ID NO: 37; an A2723G mutation in SEQ ID NO: 37; a G1797T mutation in SEQ ID NO: 37; a T2252G mutation in SEQ ID NO: 37; a C1560A mutation in SEQ ID NO: 37; a T1031C mutation in SEQ ID NO: 37; a G2645A mutation in SEQ ID NO: 37; a C2043G mutation in SEQ ID NO: 37; a C2446T mutation in SEQ ID NO: 37; a A2198G mutation in SEQ ID NO: 37; A2281G mutation in SEQ ID NO: 37; a C920G mutation in SEQ ID NO: 37; a A2204G mutation in SEQ ID NO: 37; and a frameshift mutation in DNMT3A.
   124. The method of any one of paragraphs 120-123, wherein the one or more somatic mutations are in ASXL1 and are selected from a C2407T mutation in SEQ ID NO: 61; a C2893T mutation in SEQ ID NO: 61; a 1926_1926delinsAG mutation in SEQ ID NO: 61; and a frameshift mutation in ASXL1.
   125. The method of any one of paragraphs 120-124, wherein the one or more somatic mutations are in PPM1D and are selected from a G1618T mutation in SEQ ID NO: 64; a C1372T mutation in SEQ ID NO: 64; and a frameshift mutation in PPM1D.
   126. The method of any one of paragraphs 120-125, wherein the one or more somatic mutations are in TET2 and are selected from an S282F mutation in SEQ ID NO: 68, an N312S mutation in SEQ ID NO: 68, an L346P mutation in SEQ ID NO: 68, an S460F mutation in SEQ ID NO: 68, a D666G mutation in SEQ ID NO: 68, a P941S mutation in SEQ ID NO: 68, and a C1135Y mutation in SEQ ID NO: 68.
   127. The method of any one of paragraphs 120-125, wherein the subject further has one or more somatic mutations in TET2 in a sub-population of peripheral blood hematopoietic cells selected from an S282F mutation in SEQ ID NO: 68, an N312S mutation in SEQ ID NO: 68, an L346P mutation in SEQ ID NO: 68, an S460F mutation in SEQ ID NO: 68, a D666G mutation in SEQ ID NO: 68, a P941S mutation in SEQ ID NO: 68, and a C1135Y mutation in SEQ ID NO: 68.
   128. The method of any one of paragraphs 120-127, further comprising administering a therapeutically effective amount of a pharmaceutical composition comprising an inhibitor of HSC cardiometabolic driver gene mutation-mediated proinflammatory activity and a pharmaceutically acceptable carrier if one or more somatic mutations in one or more HSC cardiometabolic driver genes are identified in the hematopoietic cell sample.
   129. The method of paragraph 128, wherein the inhibitor of HSC cardiometabolic driver gene mutation-mediated proinflammatory activity is an IL-1β inhibitor.
   130. The method of paragraph 129, wherein the IL-1β inhibitor is an IL-1β inhibitor antibody or antigen-binding fragment thereof that binds to IL-1β and reduces IL-1β binding to its receptor(s).
   131. The method of paragraph 130, wherein the IL-1β inhibitor antibody or antigen-binding fragment thereof is selected from ABT981, an anti-interleukin-1β inhibitor antibody by ABZYME, APX002, Canakinumab/Ilaris, CDP48, immunereszumab, LY2189102, MEDI8968, and XOMA052.
   132. The method of paragraph 129, wherein the IL-1β inhibitor is an IL-1 receptor antagonist.
   133. The method of paragraph 132, wherein the IL-1 receptor antagonist is selected from CDP484, CP412245, CYT013 IL1bQb, XL 130, AMG108, HL 2351, IL1Hyl, AXXO, orthokine, PRT 1000, anakinra, and rilonacept.
   134. The method of paragraph 129, wherein the IL-1β inhibitor is a small molecule or microRNA inhibitor that inhibits IL-1β-mediated pro-inflammatory activity.
   135. The method of paragraph 134, wherein the small molecule or microRNA inhibitor is selected from AC201, CP412245, MCC950 or CRID3, inflabion, inflammasome modulator OPSONA, PGE3935199, PGE527667, TRK530, β-hydroxybutyrate (BHB), and microRNA-223.
   136. The method of paragraph 135, wherein the small molecule inhibitor is MCC950.
   137. The method of any one of paragraphs 128-136, wherein the inhibitor of HSC cardiometabolic driver gene mutation-mediated proinflammatory activity is an IL-6 inhibitor.
   138. The method of paragraph 137, wherein the IL-6 inhibitor is an IL-6 inhibitor antibody or antigen-binding fragment thereof that binds to IL-6 and reduces IL-6 binding to its receptor(s).
   139. The method of paragraph 138, wherein the IL-6 inhibitor antibody or antigen-binding fragment thereof is selected from Siltuximab, Olokizumab, Elsilimomab, mAb 1339, Sirukumab, Clazakizumab, ARGX-109, FM101, and C326.
   140. The method of paragraph 137, wherein the IL-6 inhibitor is an IL-6 receptor antagonist.
   141. The method of paragraph 140, wherein the IL-6 receptor antagonist is selected from tocilizumab, sarilumab, REGN88, FE301, and LMT-28.
   142. The method of paragraph 137, wherein the IL-6 inhibitor is a small molecule or microRNA inhibitor.
   143. The method of paragraph 141, wherein the small molecule IL-6 inhibitor is ALX-0061 or LMT-28.
   144. The method of paragraph 137, wherein the IL-6 inhibitor is a JAK-STAT inhibitor.
   145. The method of paragraph 144, wherein the JAK-STAT inhibitor is selected from baricitinib, decernotinid, filgotinib, INCB-039110, ruxolitinib, tofacitinib, Oclacitinib, Gandotinib, Lestaurtinib, Momelotinib, Pacritinib, PF-04965842, Upadacitinib, and Peficitinib.
   146. The method of any one of paragraphs 127-145, wherein the inhibitor of HSC cardiometabolic driver gene mutation-mediated proinflammatory activity is a TNFα inhibitor.
   147. The method of paragraph 146, wherein the TNFα inhibitor is a TNFα inhibitor antibody or antigen-binding fragment thereof that binds to TNFα and reduces TNFα binding to its receptor(s).
   148. The method of paragraph 147, wherein the TNFα inhibitor antibody or antigen-binding fragment thereof is selected from adalimumab, Adalimumab-atto, certolizumab pegol, golimumab, infliximab,
   149. The method of paragraph 146, wherein the TNFα inhibitor is a TNFα receptor antagonist.
   150. The method of paragraph 149, wherein the TNFα receptor antagonist is etanercept.
   151. The method of paragraph 146, wherein the TNFα inhibitor is a small molecule or microRNA inhibitor.
   152. The method of any one of paragraphs 127-151, further comprising monitoring hematopoietic cell clonality, IL-1β proinflammatory activity, IL-6 proinflammatory activity, TNFα proinflammatory activity or any combination thereof following the administration of the inhibitor of HSC cardiometabolic driver gene mutation-mediated proinflammatory activity.
   153. The method of any one of paragraphs 127-152, further comprising decreasing the number or percentage of hematopoietic cells comprising the one or more somatic mutations in the one or more HSC cardiometabolic driver genes in the subject by performing therapeutic cytapheresis on the subject.
   154. The method of any one of paragraphs 127-153, further comprising administering one or more additional therapeutic agents to the subject.
   155. The method of any one of paragraphs 115-154, wherein the HSC cardiometabolic driver gene mutation-mediated proinflammatory disease is a cardiometabolic disease or disorder.
   156. The method of any one of paragraphs 1-155, wherein the HSC cardiometabolic driver gene mutation-mediated proinflammatory disease is a chronic kidney disease or disorder.

### EXAMPLES

### Example 1: TP53 Mediated Hematopoietic Cell Expansion Contributes to Pathological Remodeling in Experimental Heart Failure

[0352] Somatic inactivating mutations in TP53 are associated with the phenomenon of clonal hematopoiesis, a common condition found in the elderly population that generally has little or no impact on the abundance of hematocrit or levels of leukocytes and platelets, but has been associated with increased mortality due to heart disease and stroke.

[0353] As demonstrated herein, competitive bone marrow transplantation studies in mice (FIG. 8A) revealed the selective expansion TP53-deficient cells into multiple blood cell lineages (FIG. 8B). Selective expansion of TP53 was also observed in the lineage marker−, c-Kit+, Sca1+(LSK) and hematopoietic progenitor cells of the irradiated mice (FIG. 8C). The effect of TP53 loss of function on LPS-induced cytokine and chemokine production was assessed. Murine neutrophils were isolated from bone marrow of TP53-heterozygous mice or WT mice. Cytokine and chemokine transcript levels were measured at indicated time points after stimulation with 10 ng/ml LPS (FIGS. 46A-46F). Analysis of transcripts revealed that IL6 (FIG. 2 and FIG. 5A), IL13 (FIG. 2 and FIG. 5B), TNFα (FIG. 2 and FIG. 5C), CCL3 (FIG. 5D), CXCL2 (FIG. 5E), and CXCL3 (FIG. 5F) were upregulated. A summary of the effects of the clonal hematopoiesis genes Tet2, Dnmt3a, Asxl1, Ppm1d/Wip1, JAK2 (V617F) and TP53 on cytokine expression is shown in FIG. 1 and FIG. 45. When mice underwent a competitive BMT with TP53-deficient (30%) and wild type (70%) cells followed by permanent LAD ligation (FIG. 9A), hearts displayed greater remodeling and diminished function (FIG. 9B) and lungs displayed greater congestion (FIG. 9C), consistent with an exacerbated heart failure phenotype. These data demonstrate that TP53-mediated clonal hematopoiesis can contribute to pathological cardiac remodeling following myocardial injury and facilitate heart failure.

### Example 2: Myeloid JAK2V617F Expression Contributes to Pathological Remodeling in Experimental Heart Failure in the Absence of Changes in Hematopoietic Cell Number

[0354] The somatic activating mutation V617F in JAK2 in hematopoietic cells is associated with polycythemia vera, a neoplasm involving the overproduction of red blood cells and platelets. Recently, it has been found that the JAK2V617F mutation is also associated with the phenomenon of clonal hematopoiesis, a common condition found in the elderly population that generally has little or no impact on the abundance of red or white blood cells but has been associated with increased mortality due to heart disease and stroke.

[0355] As shown herein, competitive bone marrow transplantation studies in mice revealed that the expansion of human JAK2V617F in leukocytes occurred almost exclusively in the myeloid lineage (FIGS. 10A-10B). To examine the consequences of myeloid JAK2V617F expression that are independent of changes in hematopoietic cell number, a myeloid-specific lentivirus expression vector was constructed whereby the human JAK2V617F cDNA was expressed from the CD146-gp91 promoter (FIG. 11A). Bone marrow was transduced with the JAK2V617F and control lentivirus vectors and implanted into lethally-irradiated recipient mice (FIG. 11B). A high level of JAK2V617F chimerism was observed in monocytes and neutrophils, but not in B or T cells (FIGS. 11C, 11D). Levels of red blood cells and platelets were unaffected by the transduction of bone marrow with the JAK2V617F vector. Subjecting JAK2V617F-transduced mice to permanent LAD ligation or transverse aortic constriction (TAC) led to greater pathological remodeling of the heart following injury (FIGS. 12A-12D, 13A-13D respectively). The greater pathological remodeling was accompanied by the broad over-activation of cytokines, including I1-6, IL-1β and TNFα, in the heart (FIG. 12D). These data indicate that JAK2V617F-mediated clonal hematopoiesis can contribute to pathological cardiac remodeling following myocardial injury and facilitate heart failure independent of changes in hematocrit and platelet levels.

### Example 3: Dnmt3a-Deficiency in Hematopoietic Cells Contributes to Pathological Cardiac Remodeling in Experimental Heart Failure

[0356] Somatic inactivating mutations in DNMT3A are associated with the phenomenon of clonal hematopoiesis, a common condition found in the elderly population that generally has little or no impact on the abundance of hematocrit or levels of leukocytes and platelets, but has been associated with increased mortality due to heart disease and stroke.

[0357] As demonstrated herein, lethally-irradiated mice underwent bone marrow transplantation (FIG. 14A) using a lentivirus vector expressing GFP and a CRISPR guide sequence that targets the Dnmt3a gene (FIG. 14B). Flow cytometry revealed that the stable expression of GFP in various hematopoietic cell lineages (FIG. 14C). Expansion of mutant cells was not observed, consistent with prior studies of Dnmt3a in the murine hematopoietic system (G A Challen et al., 2012 Nature Genetics 44:23-31). Genomic DNA was isolated from the lentivirus-transduced Lin-negative cells, and segments of the targeted site DNA were amplified by PCR and subcloned into a TA plasmid vector for sequencing. Sequence analysis of the mutations introduced into the Dnmt3a gene are shown in FIG. 14D.

[0358] As demonstrated herein, the effects of Dnmt3a inactivation on LPS-induced cytokine production was assessed. Murine J774.1 cells (macrophage cell line) were stably transformed with a lentivirus vector that inactivates the expression of Dnmt3a (closed bars) or a control vector (open bars). Cytokine transcript levels were measured at the indicated time points after stimulation with 10 ng/ml LPS. Analysis of transcripts revealed that IL6 (FIG. 3), IL13 (FIG. 3) and TNFα (FIG. 3) were upregulated. A summary of the effects of the clonal hematopoiesis genes Tet2, Dnmt3a, Asxl1, Ppm1d/Wip1, JAK2 (V617F) and TP53 on cytokine expression is shown in FIG. 1 and FIG. 45.

[0359] Mice underwent BMT with bone marrow treated with the lentivuirus Dnmt3a-CRISPR vector and were treated with Angiotensin II to induce cardiac stress (FIG. 15A). Hematopoietic cell mutation of Dnmt3a led to diminished cardiac function (FIG. 15B), increased cardiac hypertrophy (FIG. 15C), increased myocyte hypertrophy (FIG. 15D) and increased cardiac fibrosis (FIG. 15E). These data indicate that DNMT3A-mediated clonal hematopoiesis can contribute to pathological cardiac remodeling following injury and facilitate heart failure.

### Example 4: Tet2-Mediated Clonal Hematopoiesis Accelerates Heart Failure Through a Mechanism Involving the IL-1f3/NLRP3 Inflammasome

[0360] Recent studies have shown that hematopoietic stem cells can undergo clonal expansion due to somatic mutations in leukemia-related genes, leading to an age-dependent accumulation of mutant leukocytes in the blood. This somatic mutation-related clonal hematopoiesis is common in the healthy elderly, but it has been associated with an increased incidence of future cardiovascular disease.

[0361] Clonal hematopoiesis resulting from somatic mutations in hematopoietic stem cells is common in the elderly population and has been associated with increased incidence of cardiovascular disease. Here, it is shown that the inactivation of Tet2 in hematopoietic cells promotes their expansion and exacerbates cardiac remodeling in experimental models of heart failure via an IL-1β/NLRP3 inflammasome mechanism. These data demonstrate that post-Myocardial Infarction (MI) patients with somatic mutations in TET2 may exhibit a greater benefit from therapies that target IL-1β or the NLRP3 inflammasome.

[0362] The epigenetic regulator TET2 is frequently mutated in blood cells of individuals exhibiting clonal hematopoiesis. Tet2 deficiency in hematopoietic cells is associated with greater cardiac dysfunction in murine models of heart failure due to elevated IL-1β signaling. These data demonstrate that individuals with TET2-mediated clonal hematopoiesis may be at greater risk of developing heart failure and respond better to IL-1β/NLRP3 inflammasome inhibition.

[0363] As demonstrated herein, Tet2 mutations within hematopoietic cells can contribute to heart failure in two models of cardiac injury. Heart failure was induced in mice by pressure overload, achieved by transverse aortic constriction or chronic ischemia induced by the permanent ligation of the left anterior descending artery. Competitive bone marrow transplantation strategies using Tet2-deficient cells were used to mimic TET2 mutation-driven clonal hematopoiesis. Tet2 was also specifically ablated in myeloid cells using Cre recombinase expressed from the LysM promoter.

[0364] As demonstrated herein, in both experimental heart failure models, hematopoietic or myeloid Tet2 deficiency worsened cardiac remodeling and function, in parallel with increased IL-1β expression. Treatment with a selective NLRP3 inflammasome inhibitor (e.g. MCC950) protected against the development of heart failure and eliminated the differences in cardiac parameters between Tet2-deficient and wild-type mice.

TABLE 2
List of abbreviations.

| Full name | Abbreviation |
|---|---|
| Bone Marrow transplantation | BMT |
| Canakinumab Anti-inflammatory | CANTOS |
| Thrombosis Outcomes Study | |
| Cluster of differentiation 45 antigen | CD45 |
| C-reactive protein | CRP |
| cross-sectional area | CSA |
| Cardiovascular disease | CVD |
| DNA (cytosine-5)- | DNMT3A |
| methyltransferase 3A | |
| Ejection fraction | EF |
| Fractional shortening | FS |
| Hematopoietic stem/progenitor cells | HSPC |
| Heart weight | HW |
| Interleukin 1 beta | IL-1β |
| Knockout | KO |
| Left anterior descending | LAD |
| Left ventricle | LV |
| Left ventricle posterior wall | LVPWTd |
| thickness at diastole | |
| Lung weight | LW |
| Mycocardial infarction | MI |
| NACHT, LRR and PYD | NLRP3 |
| domains-containing protein 3 | |
| Not significant | NS |
| Phosphate buffered saline | PBS |
| quantitative polymerase chain reaction | qPCR |
| ST-Elevation Myocardial Infarction | STEMI |
| Transverse aortic constriction | TAC |
| Ten-eleven translocation 2 | TET2 |
| Tibia length | TL |
| White blood cells | WBC |
| Wild-type | WT |

[0365] Introduction

[0366] The prevalence of heart failure approximately doubles with each decade of life (1,2), and due to dramatic increases in the aging population, the heart failure epidemic is anticipated to grow significantly in the coming decades (3). While aging is the major risk factor for heart failure and overall cardiovascular disease, it is not understood how this condition promotes disease progression.

[0367] The accumulation of somatic DNA mutations in proliferative tissues is an inevitable consequence of the aging process that leads to the generation of tissues that are a mosaic of slightly different genotypes (4). In this context, the highly proliferative hematopoietic system is known to accumulate a substantial number of somatic mutations, which leads to an intense Darwinian selection due to the competition among the different mutant clones (5). Thus, the accumulation of mutations that provide a selective proliferative advantage to hematopoietic stem/progenitor cells (HSPC) will over time lead to the clonal expansion of specific mutations that become selectively overrepresented in the blood cells genomes. This phenomenon of somatic mutation-induced clonal hematopoiesis has been found to be relatively common in non-symptomatic, cancer-free, elderly individuals (6-8). Recent longitudinal studies have reported that detectable clonal hematopoiesis in non-symptomatic individuals is associated with all-cause mortality (6,7,9). While clonal hematopoiesis increases the risk of developing a hematological malignancy, this condition is relatively rare and does not significantly contribute to overall mortality under these conditions. Instead mortality associated with clonal hematopoiesis is attributed to larger increases in the incidence of coronary heart disease and stroke (7).

[0368] The protein encoded by TET2 (ten-eleven translocation 2) is an epigenetic regulatory enzyme that modulates HSPC self-renewal (10-13). TET2 gene was the first gene reported to exhibit somatic mutations in blood cells in individuals with clonal hematopoiesis in the absence of hematological malignancies (14). More than 130 distinct mutations have been reported in the TET2 gene in cancer-free individuals (6-9,14-18), the majority being small insertions/deletions, nonsense mutations, etc., that are predicted to inactivate the enzyme. The inventors have previously demonstrated that somatic TET2 mutations in blood cells play a causal role in atherosclerosis (19).

[0369] As demonstrated herein, partial bone marrow reconstitution with Tet2-deficient hematopoietic cells led to their clonal expansion and markedly increased atherosclerotic plaque size in hyperlipidemic mice. Mechanistically, Tet2-deficient macrophages exhibited greater interleukin-1β secretion, and the administration of an NLRP3 inhibitor showed greater athero-protective activity in chimeric mice reconstituted with Tet2-deficient cells than in non-chimeric mice and suppressed differences in plaque size between genotypes.

[0370] There have been no experimental studies in model systems to test whether somatic TET2 mutations in hematopoietic cells are causally linked to myocardial infarction or heart failure. As demonstrated herein, the effects of genetic inactivation of hematopoietic Tet2 in murine models of heart failure involving chronic ischemia and pressure overload hypertrophy were investigated.

[0371] Methods

[0372] C57Bl/6J Tet2-deficient mice (Tet2^{-/-} and ^{+/-}), C57Bl/6J LysM-Cre mice, C57Bl/6J Tet2-floxed mice and C57Bl/6 Cd45.1⁺ PepBoy mice were used for these studies. These mice were used to examine the consequences of hematopoietic Tet2-deficiency using competitive bone marrow transplantations (BMT, 10% CD45.2 and 90% CD45.1 bone marrow cells) or conditional myeloid-restricted inactivation of Tet2. Both of these models of genetic Tet2 deficiency were employed in two surgical models of murine heart failure: the permanent ligation of the left anterior descending artery (LAD) and transverse aortic constriction (TAC) as described previously (20-26). Surgically-treated and sham mice were characterized by echocardiographic, histological and qPCR analyses. In some experiments, mice were continuously infused with the NLRP3 inflammasome inhibitor MCC950 (27) at a dose of 5 mg per kg per day or with phosphate-buffered saline (PBS) vehicle via subcutaneous osmotic pumps. In the BMT approach, the expansion of Tet2-deficient HSPC into the different blood lineages was assessed by flow cytometry using the gating strategy shown in FIG. 22. Leukocyte levels in the heart were determined by flow cytometry using the gating strategy outlined in FIG. 23 (28,29). For some assays, bone marrow-derived macrophages from conditional or whole-body Tet2-deficient mice were utilized for qPCR analyses. Primers for gene expression experiments are provided herein.

[0373] Statistics

[0374] Data were expressed as mean+SEM, or median (minimum to maximum). Data distribution was evaluated by Shapiro-Wilk normality test. An F-test was used to evaluate homogeneity of variance. Normally distributed data with only one variable were analyzed by parametric analysis: unpaired (two-tailed) Student's t test (with welch correction when variance was unequal) for two groups and one-way ANOVA with Tukey's multiple comparison test for three or more groups. Non-normally distributed data with only one variable were analyzed by non-parametric analysis: Mann-Whitney U test (two-tailed) for two groups. Data with more than one variable were evaluated by two-way ANOVA, with post-hoc Tukey's multiple comparison tests. Results of echography were evaluated by two-way repeated measure ANOVA with post-hoc Sidak's or Tukey's multiple comparison tests. In survival analysis, Kaplan Meier survival curves were compared by log-rank test. All the statistical analysis was performed by GraphPad Prism 7 software (GraphPad Software).

[0375] Results

[0376] A competitive bone marrow transplantation (BMT) strategy was employed to mimic the clonal hematopoiesis that results from Tet2 inactivation and study its effects on experimental MI (FIG. 16A). Lethally irradiated mice were transplanted with bone marrow cells containing 10% Tet2^{-/-} cells and 90% Tet2^{+/+} cells (i.e. the 10% knock out (KO) test condition). To distinguish between these different genotypes, wild-type Tet2^{+/+} cells were harvested from mice carrying the CD45.1 variant of the CD45 antigen, and Tet2^{-/-} cells were harvested from mice harboring the CD45.2 variant. Control wild-type (WT) mice received 10% CD45.2⁺Tet2^{+/+} and 90% CD45.⁺Tet2^{+/+} cells. At 8 weeks after BMT and at 4 weeks after LAD ligation in BMT-treated animals (pre and post, respectively) flow cytometry was performed on blood leukocytes to assess the expansion of Tet2^{-/-} cells (FIG. 16B). Consistent with our prior report (19), Tet2^{-/-} CD45.2⁺ cells displayed a time dependent expansion into the white blood cells (WBC), Ly6C^{hi} monocytes and neutrophils (FIG. 16B). Although Tet2-deficient donor mice displayed a small elevation in lineage marker, c-Kit⁺, Sca1⁺ (LSK), this difference did not appear to account for the large increase in Tet2^{-/-} cell expansion into the difference lineages (FIGS. 24A-24D). Tet2-deficient donor mice also did not display differences in levels of GMP or MDP progenitor cells, neutrophils, or monocytes, or spleen weights at this age. These Tet2^{-/-} cells expanded into multiple blood lineages, but a reduced expansion into the T cell lineage was observed (FIG. 25). Total WBC levels were unaffected by genotype (FIG. 16C).

[0377] At the 8 week time point, mice from both experimental groups underwent permanent LAD ligation surgery as described previously (20,25,26). Permanent LAD ligation surgery did not affect the expansion of Tet2^{-/-} cells (FIGS. 26A-26B). Consistent with prior studies (30), all transplanted mice survived surgery following irradiation (FIG. 27). At 4 weeks after myocardial infarction (MI) surgery, the 10% KO-BMT mice displayed statistically significant increases in left ventricle (LV) systolic volume and LV diastolic volume, indicative of greater systolic dysfunction, compared to control mice that also underwent BMT and MI surgery (FIG. 16D). Trends in these echocardiographic parameters were observed at the 2 week time point but did not reach statistical significance. Ejection fraction was significantly reduced in the 10% KO-BMT group at 2 and 4 weeks post-MI. Consistent with a lack of difference in echocardiographic parameters at the 1 week time point, there was no detectable difference in infarct size between 10% KO-BMT and 10% WT-BMT mice (FIG. 16E). There was a statistically significant increase in fibrosis in the marginal zone of the 10% KO-BMT mice (FIG. 16F). Wheat germ agglutinin staining was employed on tissue sections, to determine cardiac myocyte cross-sectional area, revealed that myocytes from 10% KO-BMT mice displayed greater hypertrophy at the marginal zone (FIG. 16G), consistent with greater post-MI cardiac remodeling. Analysis of the infarct marginal zone for F4-80-positive cells revealed greater macrophage infiltration at the 4 week post-MI time point (FIG. 25). In separate studies, competitive BMT experiments with Tet2^{+/-} cells revealed that Tet2 heterozygosity is sufficient to promote cardiac dysfunction in this model, albeit at a reduced level compared to homozygous Tet2-deficient cells (FIGS. 28A-28C). These findings are consistent with the slower kinetics of Tet2-heterozygous cell expansion.

[0378] Due to the central role of macrophage activation in post-MI remodeling (31) and the preferential expansion of human TET2-mutant cells into the myeloid lineage in mice (32), it was investigated whether the targeted ablation of Tet2 would be sufficient to promote post-MI remodeling. Myeloid-deficient Tet2 mice (Myelo-Tet2-KO mice) were generated using LysM-Cre/LoxP strategies and subjected to permanent LAD ligation (FIG. 17A). Using this system, the ablation of Tet2 in bone marrow-derived macrophages occurred at an efficiency of 74% (FIG. 17B). This condition did not lead to detectable changes in the levels of hematopoietic cells (FIG. 17C and FIGS. 29A-29B). No differences in mouse survival following LAD ligation was detected between Tet2-deficient and control strains of mice over the time course of this experiment (FIG. 17D). However, Myelo-Tet2-KO mice displayed a statistically significant increase in LV systolic and LV diastolic volumes at the 4 week post-MI time point, and trends toward increases in these parameters at the 2 week time point, compared with control mice (FIG. 17E). Calculated ejection fraction showed statistically significant reductions at both 2 and 4 week time points in the Myelo-Tet2-KO mice. Infarct size was unaffected by the different myeloid Tet2 genotypes (FIG. 17F). At the terminal 4 week time point hearts from Myelo-Tet2-KO mice displayed an increase in fibrosis in cardiac tissue sections from the marginal zone (FIG. 17G), and an increase in cardiac myocyte cross sectional area (FIG. 17H), consistent with greater cardiac remodeling.

[0379] As demonstrated herein, analysis of transcripts revealed that interleukin 1 beta (IL-1β), IL-18, Cxcl2, Ccl2, Ccl5 and P-selectin were upregulated in the post-MI hearts of 10% KO-BMT mice compared to 10% WT-BMT mice (FIG. 18A). In contrast, little or no statistical differences were detected in the transcript levels of IL-6, TNFα. The 10% KO-BMT, post-MI hearts also displayed an increase in CD45⁺ leukocytes that could primarily by attributed to the abundance of macrophages (FIG. 18B, 18C and FIGS. 30A-30B). The increase in macrophage number was not accompanied by an increase in proliferation, as assessed by Ki67 (FIGS. 31A-31B). To document changes in IL-1β protein, confocal microscopy immunofluorescence staining of IL-1β was performed on marginal zone sections of hearts at the 4 week post-MI time point. Cardiac sections from 10% KO-BMT mice displayed significantly greater IL-1β expression than sections of 10% WT-BMT mice (FIG. 18D). Consistent with these results, IL-1β transcript levels were upregulated in the myocardium of the Tet2-KO mice compared to control mice at the 4 week post-MI time point (FIG. 18E). Bone marrow-derived macrophages isolated from whole body Tet2-deficient mice also displayed elevated IL-1β, IL-6 and Ccl5 transcript expression (FIG. 18F).

[0380] As demonstrated herein, the functional significance of NLRP3-mediated IL-1β production in cardiac remodeling was assessed. 10% KO-BMT and 10% WT-BMT mice were infused with the specific NLRP3 inhibitor MCC950 starting at one week post-MI and continued until sacrifice at 5 weeks (FIG. 19A). At the one week time point (initiation of MCC950 infusion), there were no detectable differences in echocardiographic parameters in the different experimental groups of mice (FIG. 19B). However, by week 5 post-MI, MCC950 treatment led to significant protection against cardiac remodeling in both 10% KO-BMT and 10% WT-BMT mice. Notably, the MCC950 treatment completely eliminated echocardiographic differences in LV systolic volume, LV diastolic volume or ejection fraction, between the Tet2-deficient and WT experimental conditions (FIG. 19B). Treatment with MCC950 infusion also diminished marginal zone fibrosis at the 5 week time point in both 10% KO-BMT and 10% WT-BMT mice and eliminated the difference in this parameter between these experimental groups (FIG. 19C). Similarly, cardiac myocyte hypertrophy was markedly reduced by MCC950 treatment in both Tet2-deficient and WT mice and the drug eliminated the difference in this parameter between experimental groups (FIG. 19D). In a separate experiment, treatment with MCC950 had no effect on the expansion of Tet2^{-/-} HSPC into the different blood lineages (FIGS. 32A-32B), consistent with our previous study (19).

[0381] To corroborate these findings in a different model of heart failure, experimental groups of mice were also subjected to pressure overload hypertrophy by performing transverse aortic constriction (TAC) (FIG. 20A). In this model, the heart initially undergoes compensatory hypertrophy, but transitions to decompensated hypertrophy due to capillary rarefaction and other chronic pathological alterations (33,34). Because 10% KO-BMT mice exhibited increased IL-1β expression in this model (FIG. 20B), similar to our observation in the LAD model, TAC experiments were performed in mice treated with the NLRP3 inflammasome inhibitor MCC950 or vehicle control as described above to assess the effects of blockade of NLRP3 inflammasome-mediated IL-1β secretion. In this setting, MCC950 treatment was started at the time of surgery and maintained until termination of the experiment. Vehicle-infused 10% KO-BMT mice exhibited marked cardiac hypertrophy after TAC, as reflected by a greater increase in relative heart size and heart weight to tibia length ratio compared to 10% WT-BMT mice (FIGS. 20C-20D). 10% KO-BMT mice also displayed greater LV posterior wall thickness and a greater impairment in fractional shortening in the hearts of the 10% KO-BMT mice (FIG. 20E). Correspondingly, 10% KO-BMT mice displayed more fibrosis (FIG. 20F) and cardiac myocyte hypertrophy (FIG. 20G) following LAD ligation. As with the partial BMT, myeloid cell-specific ablation of Tet2 led to greater cardiac hypertrophy (FIGS. 28A-28C) and diminished cardiac function (FIGS. 29A-29B) compared to control mice. Mye-Tet2-KO mice also displayed greater expression of IL-1β after TAC than the control strain (FIGS. 30A-30B). Treatment with MCC950 had a marked inhibitory effect on the development of pressure overload-induced cardiac hypertrophy and it suppressed the differences in heart size, cardiac function, myocyte hypertrophy and interstitial fibrosis observed between the 10% KO-BMT and 10% WT-BMT mice in this model (FIGS. 20C-20G).

[0382] In separate experiments employing the TAC model of heart failure, the targeted ablation of Tet2 in myeloid cells also led to greater cardiac hypertrophy and diminished function compared to control mice (FIGS. 33A-33I). Myeloid Tet2-deficiency also led to greater lung congestion, myocardial fibrosis and myocyte hypertrophy. Hearts from these mice displayed greater expression of IL-1β transcript and more macrophages in the myocardium.

[0383] A number of recent studies have shown that it is common to find non-symptomatic individuals that exhibit clonal hematopoiesis associated with the expansion of hematopoietic cells that contain a mutation in one of a number of cancer-related genes (FIG. 21). The most common mutations occur in epigenetic regulatory genes, such as TET2, that are frequently mutated in hematological cancers (6-8). Deep sequencing of mutational hotspots within candidate genes or whole exome sequencing of a well characterized cohort revealed that clonal hematopoiesis is common in the elderly (6-9,16-18,35). Remarkably, a study employing highly sensitive targeted error-corrected sequencing revealed that 95% of individuals in their 50's possesses low levels of these mutations (predominantly DNMT3A and TET2), demonstrating that the seeding of bone marrow with mutated hematopoietic cells is essentially ubiquitous by middle age (36). These findings have led to the compelling notion that age-associated chronic diseases, both cardiovascular disease (CVD) and non-CVD, may be influenced by the occurrence of somatic mutations that lead to clonal hematopoiesis. While previous studies in our laboratory demonstrated that clonal hematopoiesis associated with Tet2 deficiency accelerates atherosclerosis in mice (19), our experimental findings presented herein demonstrate that this phenomenon may have broader implications in the context of CVD, as it may also promote heart failure in post-MI patients.

[0384] The results of the experiments show for the first time that the partial inactivation of Tet2 in hematopoietic cells, a condition that contributes to clonal hematopoiesis in humans, will promote cardiac dysfunction in two murine models of heart failure. The permanent ligation of the LAD artery is a model of severe ischemia that leads to myocardial necrosis and the remodeling of the heart in response to scar formation. The TAC model initially induces a cardiac hypertrophic response to pressure overload, and this is followed by systolic dysfunction in response to capillary rarefaction (33,34). In both of these models, Tet2-deficiency in hematopoietic cells, either by specific ablation in myeloid cells or by partial reconstitution of the bone marrow with Tet2-deficient HSPC, was associated with worse late-stage cardiac remodeling and reduced cardiac function.

[0385] As demonstrated herein, Tet2-mediated clonal hematopoiesis leads to the up-regulation of IL-1β in two models of heart failure. IL-103 is processed to an active form and secreted following cleavage in the cytosol of innate immune cells by the NLRP3 inflammasome. Treatment with the NLRP3 inflammasome inhibitor MCC950 protected against the development of heart failure in both the LAD ligation and TAC models and eliminated the differences in cardiac parameters between Tet2-deficient and wild-type (WT) mice. These findings strongly demonstrate a central role for exacerbated IL-1β production in the maladaptive cardiac remodeling observed in conditions of hematopoietic Tet2 loss of function. Consistent with this possibility, previous studies have demonstrated an important role of IL-1β in CVD. A number of compelling studies in animal models have shown that the neutralization of IL-1β or inhibition of the inflammasome will protect the ischemic heart (37-41). IL-1β levels are elevated after ST-Elevation Myocardial Infarction (STEMI) and associated with maladaptive remodeling (42), and an IL-1β neutralizing antibody has recently shown efficacy in high risk post-MI patients (43). IL-1β has been shown to have local effects on the heart (44) as well as early systemic actions that includes the enhancement of HSPC proliferation within 1 day of the infarct (45). However, neither inflammasome inhibition nor LAD ligation had a detectable impact on Tet2-deficient leukocyte expansion in the current study.

[0386] Tet2 is a multifaceted epigenetic regulator that is able to facilitate both transcription activation and repression depending on context. Previous studies have shown that Tet2 acts as a negative regulator of pro-inflammatory macrophage activation and that it can function to repress LPS-induced IL-6 expression (46,47). A mechanistic link between Tet2 inactivation and NLRP3-mediated IL-1β production has also been documented (19). Tet2-deficient macrophages express higher levels of IL-1β transcript and pro-IL-1β protein, its inactive precursor. Tet2-deficiency also upregulates components of the NLRP3 inflammasome, and there are increases in the levels of cleaved and secreted IL-1β that exceed the level of its transcriptional activation demonstrating that Tet2 modulates multiple steps in the IL-1β pathway. Tet2-mediated IL-1β regulation is independent of its catalytic activity, i.e. the oxidation of 5-methylcytosine, but involves changes in the recruitment of histone deacetylase to the IL-1β promoter (19,46).

[0387] The Canakinumab Anti-inflammatory Thrombosis Outcomes Study (CANTOS) has shown that the IL-1β neutralizing antibody canakinumab can reduce major adverse cardiovascular events in patients with stable coronary artery disease and elevated levels of C-reactive protein, predominantly due to reductions in the incidence of repeat myocardial infarction (43). Based upon the findings of the current study and our previous atherosclerosis studies (19), it is contemplated herein that subjects with somatic mutations in TET2 can exhibit a superior response to this treatment. In view of the infection side effect of canakinumab therapy, the identification of patients who would most benefit from this drug is warranted.

[0388] As demonstrated herein, mice with Tet2-deficiency in hematopoietic cells display greater maladaptive cardiac remodeling and dysfunction in models of pressure overload hypertrophy and permanent LAD ligation. NLRP3 inflammasome inhibition had a disproportionately greater protective effect in these models when mice were engineered to have inactivating mutations in the Tet2 gene of hematopoietic cells. Given that somatic mutation in TET2 are relatively common in the elderly population, these data demonstrate that IL-1β blockade or NLRP3 inflammasome inhibition will be particularly effective for the treatment of CVD in individuals who carry these mutations.

[0389] Clinical Perspectives

[0390] Clinical Competencies:

[0391] Elderly individuals frequently exhibit a condition referred to as clonal hematopoiesis that results from somatic, pre-leukemic gene mutations in hematopoietic stem cells. One of these commonly mutated genes is the epigenetic regulator TET2. Recent epidemiological studies have associated somatic TET2 mutations with an increased incidence of cardiovascular disease. Individuals exhibiting TET2-mediated clonal hematopoiesis may be at greater risk of developing heart failure. These data further support the concept that a precancerous state can contribute to cardiovascular diseases.

### REFERENCES

[0392] 1. de Freitas E V, Batlouni M, Gamarsky R. Heart failure in the elderly. J Geriatr Cardiol 2012; 9:101-7.
[0393] 2. Belsky D W, Caspi A, Houts R et al. Quantification of biological aging in young adults. Proc Natl Acad Sci USA 2015; 112:E4104-10.
[0394] 3. Vigen R, Maddox T M, Allen L A. Aging of the United States population: impact on heart failure. Curr Heart Fail Rep 2012; 9:369-74.
[0395] 4. Vijg J. Somatic mutations, genome mosaicism, cancer and aging. Curr Opin Genet Dev 2014; 26:141-9.
[0396] 5. Shlush L I, Zandi S, Itzkovitz S, Schuh A C. Aging, clonal hematopoiesis and preleukemia: not just bad luck? Int J Hematol 2015; 102:513-22.
[0397] 6. Genovese G, Kahler A K, Handsaker R E et al. Clonal hematopoiesis and blood-cancer risk inferred from blood DNA sequence. N Engl J Med 2014; 371:2477-87.
[0398] 7. Jaiswal S, Fontanillas P, Flannick J et al. Age-related clonal hematopoiesis associated with adverse outcomes. N Engl J Med 2014; 371:2488-98.
[0399] 8. Xie M, Lu C, Wang J et al. Age-related mutations associated with clonal hematopoietic expansion and malignancies. Nat Med 2014; 20:1472-8.
[0400] 9. Zink F, Stacey S N, Norddahl G L et al. Clonal hematopoiesis, with and without candidate driver mutations, is common in the elderly. Blood 2017.
[0401] 10. Ko M, Bandukwala H S, An J et al. Ten-Eleven-Translocation 2 (TET2) negatively regulates homeostasis and differentiation of hematopoietic stem cells in mice. Proc Natl Acad Sci USA 2011; 108:14566-71.
[0402] 11. Moran-Crusio K, Reavie L, Shih A et al. Tet2 loss leads to increased hematopoietic stem cell self-renewal and myeloid transformation. Cancer Cell 2011; 20:11-24.
[0403] 12. Quivoron C, Couronne L, Della Valle V et al. TET2 inactivation results in pleiotropic hematopoietic abnormalities in mouse and is a recurrent event during human lymphomagenesis. Cancer Cell 2011; 20:25-38.
[0404] 13. Li Z, Cai X, Cai C L et al. Deletion of Tet2 in mice leads to dysregulated hematopoietic stem cells and subsequent development of myeloid malignancies. Blood 2011; 118:4509-18.
[0405] 14. Busque L, Patel J P, Figueroa M E et al. Recurrent somatic TET2 mutations in normal elderly individuals with clonal hematopoiesis. Nat Genet 2012; 44:1179-81.
[0406] 15. Ko M, Huang Y, Jankowska A M et al. Impaired hydroxylation of 5-methylcytosine in myeloid cancers with mutant TET2. Nature 2010; 468:839-43.
[0407] 16. Jaiswal S, Natarajan P, Silver A J et al. Clonal Hematopoiesis and Risk of Atherosclerotic Cardiovascular Disease. N Engl J Med 2017.
[0408] 17. Buscarlet M, Provost S, Zada Y F et al. DNMT3A and TET2 dominate clonal hematopoiesis and demonstrate benign phenotypes and different genetic predispositions. Blood 2017; 130:753-762.
[0409] 18. Acuna-Hidalgo R, Sengul H, Steehouwer M et al. Ultra-sensitive Sequencing Identifies High Prevalence of Clonal Hematopoiesis-Associated Mutations throughout Adult Life. Am J Hum Genet 2017; 101:50-64.
[0410] 19. Fuster J J, MacLauchlan S, Zuriaga M A et al. Clonal hematopoiesis associated with TET2 deficiency accelerates atherosclerosis development in mice. Science 2017; 355:842-847.
[0411] 20. Maruyama S, Nakamura K, Papanicolaou K N et al. Follistatin-like 1 promotes cardiac fibroblast activation and protects the heart from rupture. EMBO Mol Med 2016; 8:949-66.
[0412] 21. Shibata R, Izumiya Y, Sato K et al. Adiponectin protects against the development of systolic dysfunction following myocardial infarction. J Mol Cell Cardiol 2007; 42:1065-74.
[0413] 22. Shimano M, Ouchi N, Nakamura K et al. Cardiac myocyte-specific ablation of follistatin-like 3 attenuates stress-induced myocardial hypertrophy. J Biol Chem 2011; 286:9840-8.
[0414] 23. Shimano M, Ouchi N, Nakamura K et al. Cardiac myocyte follistatin-like 1 functions to attenuate hypertrophy following pressure overload. Proc Natl Acad Sci USA 2011; 108:E899-906.
[0415] 24. Shibata R, Ouchi N, Ito M et al. Adiponectin-mediated modulation of hypertrophic signals in the heart. Nat Med 2004; 10:1384-9.
[0416] 25. Shibata R, Sato K, Kumada M et al. Adiponectin accumulates in myocardial tissue that has been damaged by ischemia-reperfusion injury via leakage from the vascular compartment. Cardiovasc Res 2007; 74:471-9.
[0417] 26. wei K, Serpooshan V, Hurtado C et al. Epicardial FSTL1 reconstitution regenerates the adult mammalian heart. Nature 2015; 525:479-85.
[0418] 27. Coll R C, Robertson A A, Chae J J et al. A small-molecule inhibitor of the NLRP3 inflammasome for the treatment of inflammatory diseases. Nat Med 2015; 21:248-55.
[0419] 28. Anzai A, Choi J L, He S et al. The infarcted myocardium solicits GM-CSF for the detrimental oversupply of inflammatory leukocytes. J Exp Med 2017; 214:3293-3310.
[0420] 29. Hilgendorf I, Gerhardt L M, Tan T C et al. Ly-6Chigh monocytes depend on Nr4a1 to balance both inflammatory and reparative phases in the infarcted myocardium. Circ Res 2014; 114:1611-22.
[0421] 30. Protti A, Mongue-Din H, Mylonas K J et al. Bone marrow transplantation modulates tissue macrophage phenotype and enhances cardiac recovery after subsequent acute myocardial infarction. J Mol Cell Cardiol 2016; 90:120-8.
[0422] 31. Swirski F K, Nahrendorf M. Leukocyte behavior in atherosclerosis, myocardial infarction, and heart failure. Science 2013; 339:161-6.
[0423] 32. Delhommeau F, Dupont S, Della Valle V et al. Mutation in TET2 in myeloid cancers. N Engl J Med 2009; 360:2289-301.
[0424] 33. Shiojima I, Sato K, Izumiya Y et al. Disruption of coordinated cardiac hypertrophy and angiogenesis contributes to the transition to heart failure. J Clin Invest 2005; 115:2108-18.
[0425] 34. Izumiya Y, Shiojima I, Sato K, Sawyer D B, Colucci W S, Walsh K. Vascular endothelial growth factor blockade promotes the transition from compensatory cardiac hypertrophy to failure in response to pressure overload. Hypertension 2006; 47:887-93.
[0426] 35. McKerrell T, Park N, Moreno T et al. Leukemia-associated somatic mutations drive distinct patterns of age-related clonal hemopoiesis. Cell Rep 2015; 10:1239-45.
[0427] 36. Young A L, Challen G A, Birmann B M, Druley T E. Clonal haematopoiesis harbouring AML-associated mutations is ubiquitous in healthy adults. Nat Commun 2016; 7:12484.
[0428] 37. Toldo S, Schatz A M, Mezzaroma E et al. Recombinant human interleukin-1 receptor antagonist provides cardioprotection during myocardial ischemia reperfusion in the mouse. Cardiovasc Drugs Ther 2012; 26:273-6.
[0429] 38. Toldo S, Mezzaroma E, Bressi E et al. Interleukin-1beta blockade improves left ventricular systolic/diastolic function and restores contractility reserve in severe ischemic cardiomyopathy in the mouse. J Cardiovasc Pharmacol 2014; 64:1-6.
[0430] 39. Abbate A, Salloum F N, Van Tassell B W et al. Alterations in the interleukin-1/interleukin-1 receptor antagonist balance modulate cardiac remodeling following myocardial infarction in the mouse. PLoS One 2011; 6:e27923.
[0431] 40. Van Tassell B W, Arena R, Biondi-Zoccai G et al. Effects of interleukin-1 blockade with anakinra on aerobic exercise capacity in patients with heart failure and preserved ejection fraction (from the D-HART pilot study). Am J Cardiol 2014; 113:321-7.
[0432] 41. van Hout G P, Bosch L, Ellenbroek G H et al. The selective NLRP3-inflammasome inhibitor MCC950 reduces infarct size and preserves cardiac function in a pig model of myocardial infarction. Eur Heart J 2016.
[0433] 42. Orn S, Ueland T, Manhenke C et al. Increased interleukin-1beta levels are associated with left ventricular hypertrophy and remodelling following acute ST segment elevation myocardial infarction treated by primary percutaneous coronary intervention. J Intern Med 2012; 272:267-76.
[0434] 43. Ridker P M, Everett B M, Thuren T et al. Antiinflammatory Therapy with Canakinumab for Atherosclerotic Disease. N Engl J Med 2017.
[0435] 44. Saxena A, Chen W, Su Y et al. IL-1 induces proinflammatory leukocyte infiltration and regulates fibroblast phenotype in the infarcted myocardium. J Immunol 2013; 191:4838-48.
[0436] 45. Sager H B, Heidt T, Hulsmans M et al. Targeting Interleukin-1beta Reduces Leukocyte Production After Acute Myocardial Infarction. Circulation 2015; 132:1880-90.
[0437] 46. Zhang Q, Zhao K, Shen Q et al. Tet2 is required to resolve inflammation by recruiting Hdac2 to specifically repress IL-6. Nature 2015; 525:389-93.
[0438] 47. Cull A H, Snetsinger B, Buckstein R, wells R A, Rauh M J. Tet2 restrains inflammatory gene expression in macrophages. Exp Hematol 2017.

[0439] Material and Methods

[0440] Mice

[0441] C57Bl/6J Tet2-deficient mice (Tet2^{-/-} and ^{+/-}) (1), C57Bl/6J LysM-Cre mice, C57Bl/6J Tet2 floxed mice (2) and C57Bl/6 Cd45.1 Pep Boy mice were obtained from Jackson Laboratories. Mice with myeloid-restricted Tet2 ablation were generated by crossing Tet2-floxed mice (Tet2 flox/flox) with LysM-Cre mice. Male mice were used for the in vivo experiments unless otherwise noted. Mice were maintained on a 12-h light/dark schedule in a specific pathogen-free animal facility and given food and water ad libitum. The number of mice included in each study is indicated in the figures or the associated legends. The Institutional Animal Care and Use Committee (IACUC) of Boston University approved all study procedures.

[0442] Cell Culture

[0443] Bone marrow-derived macrophages (BMDM) were isolated and cultured in alpha-MEM supplemented with 10% FBS and penicillin/streptomycin/L-glutamine (Complete Media). Bone marrow was flushed from the tibia and femurs of female Tet2 KO (n=3) and littermate controls (n=4) at 10 weeks of age. Following lysis of red blood cells (BioLegend), cells were washed and cultured overnight in Complete Media in the presence of M-CSF (100 ng/mL). Differential plating was used to purify monocytes, that were identified as those cells unattached to tissue culture plastic following 16 hrs of culture. Macrophage proliferation and differentiation was induced by 2 days of culture in Complete Media in the presence of M-CSF. Cells were differentiated for the indicated periods of time and were detached by trypsin and scraping. RNA was isolated from pelleted cells using Qiazol and the miRNeasy Micro Kit (Qiagen) according to the manufacturer's instructions. Equal amounts of RNA were transcribed using a High Capacity Reverse transcription kit (Applied Biosystems) according to the manufacturer's instructions. SYBR-based detection was used to detect transcripts via qPCR through analysis on a ViiA7 (Applied Biosystems). Fold changes were calculated using the ΔΔCT method and normalized to 36b4.

[0444] In Vivo Inhibition of the NLRP3 Inflammasome

[0445] MCC950, a small molecule inhibitor of the NLRP3 inflammasome, was synthesized as previously described (22) or purchased from Selleckchem.com (FIGS. 26A-26B). It was diluted in PBS and delivered in vivo at a dose of 5 mg/kg/day via subcutaneous mini-osmotic pumps (Alzet 2004), starting 1 weeks after LAD ligation or TAC surgeries. Control mice were infused with PBS. The period of infusion is indicated in the figures or associated legends.

[0446] Competitive Bone Marrow Transplantation

[0447] 6-8 week old lethally irradiated C57Bl/6 Cd45.1 Pep Boy recipients were transplanted with suspensions of BM cells containing 10% Cd45.2⁺Tet2^{-/-} cells and 90% Cd45.1⁺ Tet2^{+/+} cells (10% KO-BMT mice), or 10% Cd45.2⁺Tet2^{+/+} cells and 90% Cd45.1⁺Tet2^{+/+} cells (10% WT-BMT mice). BM cells were isolated from femurs and tibias of donor 6-8 week old mice after euthanasia. Donor Cd45.2⁺ cells were obtained from Tet2^{+/+} or ^{-/-} littermates; donor Cd45.1⁺ cells were obtained from Pep Boy mice. Recipient mice were irradiated in a pie cage (Braintree Scientific) to limit mobility and ensure an equal dose of irradiation, and were exposed to two radiation doses of 450 rad four hours apart using an X-RAD 320 Biological Irradiator. After the second irradiation, each recipient mouse was injected with 5×10⁶ BM cells via the retro-orbital vein plexus. Sterilized caging, food and water were provided during the first 14 days post-transplantation, and water was supplemented with antibiotics (Sulfatrim). 8 weeks after BMT, mice underwent cardiac surgery.

[0448] Hematopoietic Parameter Measurements

[0449] Peripheral blood cells were obtained from retro-orbital vein and collected in EDTA-coated tubes (BD). Hematopoietic parameters were analyzed by Hemavet 950FS (Drew Scientific).

[0450] Flow Cytometry Analyses of Blood and Tissue Samples

[0451] Peripheral Blood:

[0452] Antibodies: The following antibodies were used for flow cytometric analyses: anti-CD45.2-eFluor,104 (eBioscience), anti-CD45.1-PE-Cy7, A20 (eBioscience), anti-CD115-PE, AFS98 (eBioscience) anti-CD4-FITC, RM4-5 (eBioscience), anti-CD3e-PE-eFluor610, 145-2C 11 (eBioscience), anti-CD8a-BV510, 53-6.7 (BioLegend), anti-Ly6C-APC, AL-21 (BD Pharmingen™), anti-CD45R-APC-Cy7, RA-6B2 (BD Pharmingen™), anti-Ly6G-PerCP-Cy5.5, 1A8 (BD Pharmingen™), anti-CD43-BUV737, S7 (BD Horizon™). Staining strategies: Peripheral blood cells were obtained from retro-orbital vein. Red blood cells were lysed with 1×RBC Lysis Buffer (eBioscience™) for 5 minutes on ice followed by the 10 minutes incubation with Fc blocker (1:50) on ice. Incubation with antibodies were done for 20 minutes at room temperature in the dark. Dead cells were excluded from analysis by DAPI staining.

[0453] Cardiac Immune Cells:

[0454] Antibodies: For myeloid cell staining, cell suspensions were labeled with anti-CD45-Pacific Blue, 30-F11 (BioLegend), anti-CD11b-APC-Cy7, M1/70 (BioLegend), anti-Ly6G-PE, 1A8 (BioLegend), anti-Ly6C-FITC, HK1.4 (BioLegend), and anti-F4/80-PE-Cy7, BM (BioLegend). For lymphoid cell staining, cells were labeled with anti-CD45-Pacific Blue, 30-F11 (BioLegend), anti-CD3e-PE-eFluor610, 145-2C11 (eBioscience), anti-CD4-FITC, RM4-5 (eBioscience), anti-CD8a-BV510, 53-6.7 (BioLegend), anti-CD11b-AF700, M1/70 (BioLegend), anti-CD45R/B220-PE-Cy7, RA3-6B2 (BioLegend), anti-CD 19-APC-Cy7, 6D5 (BioLegend).

[0455] Staining Strategies:

[0456] Heart was extensively flushed with PBS to avoid blood contamination and then excised. Remote myocardium was separated from infarct and marginal zone as indicated in FIG. 22, minced with scissors and digested in collagenase I (450 U/ml), collagenase XI (125 U/ml), DNase I (60 U/ml), and hyaluronidase (450 U/ml) (catalog #C0130, C7657, D4513, and H3506, respectively, Sigma-Aldrich) at 225 rpm at 37° C. for 50 minutes (3). TAC-induced hypertrophied myocardium was digested in the same method. Hearts were subsequently homogenized through a 70-μm nylon mesh (Fisher Scientific). Incubation with antibodies were done for 20 minutes at room temperature in the dark. Dead cells were excluded from analysis by DAPI staining. 123count eBeads™ Counting Beads (BD Bioscience) was used for data acquisition.

[0457] Bone Marrow Cells:

[0458] Antibodies and strategies: Bone marrow cells were flushed out from bones (femur and tibia). Red blood cells were lysed with 1×RBC Lysis Buffer (eBioscience™) for 5 minutes on ice. For hematopoietic stem/progenitor cell staining, cells were labeled with biotin-conjugated anti-mouse antibodies directed against CD11b, M1/70 (BioLegend), Gr-1, RB6-8C5 (BioLegend), Ter-119, TER-119 (BioLegend), CD45R/B220, RA3-6B2 (BioLegend), CD3e, 145-2C11 (BioLegend), and CD127, A7R34 (BioLegend) followed by a labeling with an anti-biotin PE-conjugated streptavidin antibody (BioLegend), anti-c-kit-APC, 2B8 (BioLegend), anti-Sca-1-PE-Cy7, D7 (BioLegend), anti-CD16/32-APC-Cy7, 93 (BioLegend), anti-CD34-FITC, RAM34 (eBioscience), and anti-CD115-BV421, AFS98 (BioLegend). For neutrophil and monocyte staining, anti-CD11b-APC-Cy7, M1/70 (BioLegend), anti-CD115-APC, AFS98 (BioLegend), anti-Ly6G-PE, 1A8 (BioLegend), anti-I-A/I-E (MHC-class II)-AF700, M5/114.15.2 (BioLegend) were used. Dead cells were excluded from analysis by DAPI staining. BD LSR II Flow Cytometer (BD Bioscience) was used for data acquisition. Cells were defined as described in FIG. 22 (peripheral blood cells), FIG. 23 (cardiac immune cells), and FIGS. 24A-24D (bone marrow hematopoietic stem/progenitor cells). Data were analyzed with FlowJo Software.

[0459] Experimental LAD ligation

[0460] Mice initially underwent partial (10%) bone marrow reconstitution with Tet2-deficient cells or wild type cells following lethal irradiation, followed by permanent LAD ligation after 8 weeks of recovery. For myeloid-restricted Tet2 ablation, LAD ligation was performed when mice were 8-12 weeks old. Surgery was performed as previously described (4) with some modifications. Briefly, following anesthetization (isoflurane inhalation) and tracheal intubation, the chest cavity was open from the 4^{th} intercostal space. Left ascending coronary artery was ligated tightly with a tapered 8-0 vicryl suture (J401G, Ethicon) under microscopy. Myocardial ischemia was confirmed by ST-T segment elevation in electrocardiogram and color changes in the segment of left ventricle subjected to coronary flow occlusion. To close the wound, braided 6-0 vicryl suture (J212H, Ethicon) was used. Post-surgery, mice were monitored every day for 3 days, and treated with an intraperitoneal injection of buprenorphine (0.1 mg/kg) twice a day. Mice that died within 12 hours of surgery were excluded from analysis, and perioperative survival rate in this study was more than 95%. Surgery to each groups of mice was performed by an individual who was blinded to the identity of the mouse genotype.

[0461] Transverse Aortic Constriction (TAC)

[0462] Surgery was performed as previously described (5). Briefly, mice were anaesthetized with isoflurane inhalation. After the chest cavity was exposed by cutting open the proximal portion of the sternum, aortic constriction was produced by ligation of the transverse thoracic aorta between the innominate artery and left common carotid artery using a 27-gauge blunt needle and 7-0 silk suture. All mice were treated twice daily with buprenorphine (0.1 mg/kg) for 2 days, starting on the day of the surgery. Sham-operated mice without constriction served as controls. Surgery to each groups of mice was performed by an individual who was blinded to the identity of the mouse genotype.

[0463] Echocardiography

[0464] Cardiac function was assessed several times before and after the surgery (MI and TAC), at indicated in time points, using Vevo2100 ultrasound system equipped with MS550D probe (VisualSonics, Fujifilm). Mice were anesthetized with isoflurane at a concentration of 5% (induction) and 1-1.5% (maintenance). Each animal was placed on the heating table in a supine position with the extremities tied to the table through four electrocardiography leads. The chest was shaved using chemical hair remover, and ultrasound gel was applied to the thorax surface to optimize the visibility of the cardiac chambers. For MI study, left ventricular ejection fraction (LVEF), LV systolic and diastolic volume were measured from long-axis view by tracing end-diastolic and end-systolic endocardium. For TAC study, LV posterior wall thickness diameter (LVPWTd) and fractional shortening (FS, %) were measured from M-mode images obtained by short-axis view visualizing both papillary muscles. Measurements were performed by an individual who was blinded to the identity of the experimental groups of mice.

[0465] Measurement of the Initial Infarct Size

[0466] Mice were sacrificed 2 days after LAD ligation. Hearts were perfused with 20 ml of PBS from the apex of the heart as well as right ventricle to remove the peripheral blood. The hearts were excised and frozen in −20° C. domestic freezer for 2 hours, followed by sectioning into 2 mm slices from the ligation site. Hearts were incubated with 1% 2, 3, 5-triphenyltetrazolium chloride (TTC) in PBS for 15 minutes at 37° C. The size of infarct area was determined by computerized planimetry using Image J software.

[0467] Histology

[0468] The heart tissues were obtained at indicated time course after LAD ligation or TAC surgery. Heart tissues were perfused with cold PBS from apex and fixed in 10% formalin overnight and embedded in paraffin. About 7-μm-thick sections were de-paraffinized and rehydrated.

[0469] Mason's trichrome staining was performed according to the manufacturer's instructions (Sigma-Aldrich). For Picrosirius red staining, sections were incubated with freshly prepared staining buffer (1.2%/w picric acid in water, 0.1% o/w Fast Green FCF and 0.1%/w Direct Red 80 solved in PBS) for 1 h at room temperature (all products from Sigma-Aldrich). Sections were washed briefly in dH₂O and dehydrated. The slides were mounted by coverslip using Permount mounting medium (Fisher Scientific). The images were analyzed by ImageJ software (NIH) for quantification of fibrosis. Myocardial fibrosis size was expressed as a percentage of total LV area.

[0470] To measure cardiomyocyte cross-sectional area (CSA), heart sections were stained using Alexa Fluor 488 conjugated-WGA (Life Technologies). An operator who was blinded to genotype quantified cardiomyocyte CSA by computer-assisted morphometric analysis of microscopy images acquired on a Keyence BZ-9000 microscope. The average CSA of randomly selected 50-80 round-shaped cardiomyocytes per each sample was used for analysis.

[0471] Cell Proliferation was assessed by double immunofluorescent staining with monoclonal antibodies against the proliferating cell antigen Ki-67 (rabbit IgG, clone SP6, Vector Laboratories, 1:100 dilution) and the macrophage maker Mac3 (rat IgG, clone M3/84, Santa Cruz Biotechnology, 1:400 dilution). After deparaffinization, antigen unmasking with citric acid buffer was performed. Avidin/biotin blocking was performed by using avidin/biotin blocking kit following manufacturer's protocol (Vector Laboratories). Sections were blocked with 2.5% goat serum for 1 h and then incubated with primary antibodies at 4° C. overnight. Ki-67 was visualized with biotinylated anti-rabbit IgG following fluorescein labelled streptavidin (Vector Laboratories) and Mac3 with Alexa Flour 594-conjugated anti-rat IgG (Life Technologies). DAPI was used to detect nuclei.

[0472] For IL-1β staining, deparaffinization, antigen unmasking with citric acid buffer was performed, followed by blocking with 2.5% goat serum for 1 h. Sections were incubated with primary antibody specific for IL-1β (polyclonal rabbit IgG, Bioss, 1:100 dilution), and Mac3 (rat IgG, clone M3/84, Santa Cruz Biotechnology, 1:400 dilution) for overnight at 4° C. IL-1β was visualized with biotinylated anti-rabbit IgG following fluorescein labelled streptavidin (Vector Laboratories) and Mac3 with Alexa Flour 594-conjugated anti-rat IgG (Life Technologies). Nuclei were stained with DAPI and slides were incubated with Sudan Black B (Sigma-Aldrich) to reduce autofluorescence.

[0473] Fluorescent images were taken by confocal microscope LSM710 (Zeiss) or a BZ-9000 Keyence microscope. Fluorescent signal was quantified as relative integrated fluorescence intensity by using ImageJ software (NIH).

[0474] Gene Expression Analysis by qRT-PCR.

[0475] Total RNA from tissues and cultured cells was isolated using QIAzol reagent and RNeasy kits (Qiagen). RNA (0.5-1.2 μg) was reverse transcribed with QuantiTect Reverse Transcription Kit (Qiagen). qRT-PCR was performed with Power SYBR® Green reagent (ThermoFisher Scientific) in a ViiA7 PCR system. Primers for mouse gene expression studies are shown table 3. Results were analyzed with the ΔΔCt method. 36b4 or 18S rRNA were used as reference genes for normalization.

TABLE 3
Forward and reverse primer sequences used for quantitative PCR analysis.
Table 3 discloses SEQ ID NOS 71-88, respectively, in order of appearance.

| Gene name | Species | Forward | Reverse |
|---|---|---|---|
| Il-1b | Mus Musculus | 5′-TGACAGTGATGAGAATGACCTGTTC-3′ | 5′-TTGGAAGCAGCCCTTCATCT-3′ |
| Il-6 | Mus Musculus | 5′-GCTACCAAACTGGATATAATCAGGA-3′ | 5′-CCAGGTAGCTATGGTACTCCAGAA-3′ |
| Tnf | Mus Musculus | 5′-CGGAGTCCGGGCAGG-3′ | 5′-GCTGGGTAGAGAATGGATGAA-3′ |
| Ccl2 | Mus Musculus | 5′-CAGCCAGATGCAGTTAACGC-3′ | 5′-GCCTACTCATTGGGATCATCTTG-3′ |
| Ccl5 | Mus Musculus | 5′-CAGCAGCAAGTGCTCCAATC-3′ | 5′-CACACACTTGGCGGTTCCTT-3′ |
| Selp | Mus Musculus | 5′-CATCTGGTTCAGTGCTTTGATCT-3′ | 5′-ACCCGTGAGTTATTCCATGAGT-3′ |
| Tet2 | Mus Musculus | 5′-ACATCCCTGAGAGCTCTTGC-3′ | 5′-AGAGCCTCAAGCAACCAAAA-3′ |
| 36b4 | Mus Musculus | 5′-GCTCCAAGCAGATGCAGCA-3′ | 5′-CCGGATGTGAGGCAGCAG-3′ |
| 18S rRNA | Mus Musculus | 5′-AATCAAGAACGAAAGTCGGAGG-3′ | 5′-GCGGGTCATGGGAATAACG-3′ |

### REFERENCES FOR MATERIALS AND METHODS SECTION

[0476] 1. Ko M, Bandukwala H S, An J et al. Ten-Eleven-Translocation 2 (TET2) negatively regulates homeostasis and differentiation of hematopoietic stem cells in mice. Proc Natl Acad Sci USA 2011; 108:14566-71.
[0477] 2. Moran-Crusio K, Reavie L, Shih A et al. Tet2 loss leads to increased hematopoietic stem cell self-renewal and myeloid transformation. Cancer Cell 2011; 20:11-24.
[0478] 3. Anzai A, Choi J L, He S et al. The infarcted myocardium solicits G M-CSF for the detrimental oversupply of inflammatory leukocytes. J Exp Med 2017; 214:3293-3310.
[0479] 4. Maruyama S, Nakamura K, Papanicolaou K N et al. Follistatin-like 1 promotes cardiac fibroblast activation and protects the heart from rupture. EMBO Mol Med 2016; 8:949-66.
[0480] 5. Shibata R, Ouchi N, Ito M et al. Adiponectin-mediated modulation of hypertrophic signals in the heart. Nat Med 2004; 10:1384-9.

### Example 5: TET2-Driven Clonal Hematopoiesis Predicts Enhanced Response to Anti-IL-1βAntibody Therapy

[0481] Clonal Hematopoiesis of Indeterminate Potential (CHIP) is associated with increased risk of atherosclerotic cardiovascular disease and preclinical work in mice has demonstrated that CHIP due to somatic mutations in the TET2 gene leads to accelerated atherosclerosis secondary to activation of the IL-1β signaling pathway. In the Canakinumab Anti-inflammatory Thrombosis Outcome Study (CANTOS), canakinumab, an anti-IL-1βantibody, reduced the relative risk of major adverse cardiovascular events (MACE) by 15% in patients with a history of myocardial infarction and increased inflammation as indicated by an hsCRP >2 mg/L.

[0482] A targeted deep sequencing of genes associated with CHIP in a subset (n=3925) of CANTOS trial participants was performed using genomic DNA prepared from baseline peripheral blood samples. 344 patients (8.8%) in this subset were identified with evidence for clonal hematopoiesis. As expected, the incidence of CHIP increased with age, with the mean age of CHIP(+) patients in CANTOS being 66 years old, while that of the non-CHIP patients was 61.5 years old. In contrast to populations not selected for elevated hsCRP, in the CANTOS population TET2 mutations were the most commonly detected mutations leading to CHIP (120 mutations in 104 subjects), while mutations in DNMT3A were less prevalent (86 mutations in 83 patients). Placebo-treated CHIP(+) patients showed a trend toward an increased rate of MACE compared to non-CHIP patients using a Cox proportional hazard model (HR=1.36, p=0.16). In exploratory analyses of placebo-treated patients with a somatic mutation in either TET2 or DNMT3A (n=58), a greater magnitude of risk for MACE was observed (HR=1.76, p=0.037).

[0483] CHIP(+) patients had a trend toward an improved response to canakinumab, with TET2 mutant patients having an improved response to canakinumab (HR=0.36, p=0.034). The data show that CHIP(+) patients are at increased risk for cardiovascular events and also demonstrate that those with TET2 mutations may respond better to canakinumab than those patients without CHIP.

### Example 6: Inactivation of Tet2 and Dnmt3 in Hematopoietic Cells Promotes Cardiac Dysfunction and Renal Fibrosis in Mice

[0484] Clonal hematopoiesis has been associated with increased mortality and cardiovascular disease. This condition can arise from somatic mutations in preleukemic driver genes within hematopoietic stem/progenitor cells. Approximately 40 candidate driver genes have been identified, but mutations in only 1 of these genes, TET2 (ten-eleven translocation-2), has been shown herein to casually contribute to cardiovascular disease in murine models.

[0485] To develop a facile system to evaluate the disease characteristics of different clonal hematopoiesis driver genes using lentivirus vector and CRISPR/Cas9 (clustered regularly interspaced short palindromic repeats/clustered regularly interspaced short palindromic repeat-associated 9) methodology. As demonstrated herein, it was shown that Dnmt3a (DNA [cytosine-5]-methyltransferase 3a)—a commonly occurring clonal hematopoiesis driver gene—causally contributes to cardiovascular disease.

[0486] Lentivirus vectors were used to deliver Cas9 and guide RNA to introduce inactivating mutations in Tet2 and Dnmt3a in lineage-negative bone marrow cells. After implantation into lethally irradiated mice, these cells were engrafted and gave rise to labeled blood cell progeny. When challenged with an infusion of Ang II (angiotensin II), mice with inactivating mutations in Tet2 or Dnmt3a displayed greater cardiac hypertrophy, diminished cardiac function, and greater cardiac and renal fibrosis. In comparison with Tet2, inactivation of Dnmt3a did not lead to detectable expansion of the mutant hematopoietic cells during the time course of these experiments. Tet2 inactivation promoted the expression of IL (interleukin) 1β, IL-6, and Ccl5, whereas Dnmt3a inactivation promoted the expression of Cxcl1 (CXC chemokine ligand), Cxcl2, IL-6, and Ccl5 in a lipopolysaccharide-stimulated macrophage cell line.

[0487] As demonstrated herein, inactivating DNMT3A mutations in hematopoietic cells using lentivirus vector/CRISPR methodology contributes to cardiovascular disease. As demonstrated herein by comparative analysis, inactivation of Tet2 and Dnmt3 was similar in their ability to promote Ang II-induced cardiac dysfunction and renal fibrosis in mice. Gene-specific actions were demonstrated by differences in kinetics of hematopoietic stem/progenitor cell expansion and different patterns of inflammatory gene expression.

TABLE 4
List of abbreviations.

| Full name | Abbreviation |
|---|---|
| Age-related clonal hematopoiesis | ARCH |
| Angiotensin II | AngII |
| Clonal hematopoiesis of | CHIP |
| indeterminate potential | |
| Guide RNA | gRNA |
| Insertion and deletion | Indel |

[0488] Somatic DNA mutations accumulate over time in many tissues, and this is a hallmark of the aging process (1). In particular, somatic mutations in preleukemic driver genes within hematopoietic stem/progenitor cell (HSPC) can confer fitness advantages leading to their clonal amplification. This process is referred to as clonal hematopoiesis (2). This condition is prevalent in the elderly population, and it has been termed clonal hematopoiesis of indeterminate potential 3 or age-related clonal hematopoiesis (4) Several recent studies have associated advanced clonal hematopoiesis with increased mortality (4-6) and with increased frequencies of cardiovascular disease (CVD) and stroke (4,7) Recently, we provided causal evidence for a link between somatic mutations in TET2 (ten-eleven translocation-2) and CVD in models of murine atherosclerosis and heart failure and provided details about its mechanism (8, 9) TET2 is 1 of ≈40 candidate driver genes that have been associated with clonal hematopoiesis (10). To date, there is an absence of information about the roles of driver genes, other than Tet2, in chronic disease. As demonstrated herein, the development of procedures to facilitate the analysis of additional candidate driver genes is shown.

[0489] CRISPR/Cas9-Mediated Tet2 Gene Disruption Promotes Hematopoietic Cell Expansion

[0490] As demonstrated herein, the efficiency of the lentivirus system to mutate driver genes in HSPCs was evaluated, lineage-negative cells were isolated from wild-type mice and transduced ex vivo with a lentivirus vector encoding Cas9 (clustered regularly interspaced short palindromic repeat-associated 9)-GFP (green fluorescent protein) and transplanted into lethally irradiated wild-type mice (FIG. 34A). At 8 weeks post-transplantation, the detection of GFP-positive cells in LSK− (lineage−, c-kit+, Sca-1+) or LT-HSC (hematopoietic stem cell)-gated populations revealed successful HSPC transduction and engraftment with the lentivirus system (FIG. 34B). Guide RNA candidates targeting Tet2 were selected after evaluation in NIH/3T3 by the T7 endonuclease I mismatch cleavage assay (FIGS. 38A-38E). To assess whether ex vivo Tet2 gene-edited HSPCs replicate the expansion characteristics of bone marrow cells from Tet2-knockout (KO) mice, the fractions of GFP-positive cells in the different peripheral blood cell lineages were determined at the 4- and 16-week time points (FIG. 34C). This analysis revealed expansion characteristics that were similar to what was observed in our prior studies with Tet2-KO mice (8,9). To determine the degree of Tet2 editing by the lentivirus vector, DNA sequencing of the Tet2 locus was performed on DNA-isolated GFP-positive white blood cells. All the sequence reads revealed out-of-frame indel (insertion and deletion) mutations (3n+1, 3n+2) within exon 3 (FIG. 34D), which are predicted to lead to a loss of gene function.

[0491] Phenotypes of Tet2 Gene Disruption in the Ang II Infusion Model

[0492] Having demonstrated the efficiency of the lentivirus delivery system on HSPC expansion, it was examined whether Tet2 gene editing in HSPCs promotes pathological cardiac remodeling. The Ang II infusion model was chosen because it does not involve a major surgical manipulation. To validate this new model for studies of clonal hematopoiesis, Ang II was infused to mice that had undergone a competitive bone marrow transplantation using 10% conventional CD45.2+ Tet2− KO mice and 90% CD45.1+ wild-type mice (FIGS. 39A-39B) (8,9). Flow cytometry analysis of the different blood cell lineages, according to the gating strategy shown in FIG. 40, revealed the selective expansion of the Tet2-KO hematopoietic cells (FIG. 41). In this model, mice transplanted with 10% Tet2-deficient bone marrow cells displayed greater deterioration of cardiac function by echocardiography after 8 weeks of systemic Ang II infusion compared with mice transplanted with 100% wild-type cells that were comprised of 10% CD45.2+ cells (FIG. 35A). At the termination of the experiment, hearts in mice receiving 10% Tet2-KO bone marrow displayed an increase in cardiac weight (FIG. 35B), an increase in cardiac myocyte cross sectional area (FIG. 35C), and an increase in interstitial fibrosis (FIG. 35D and FIGS. 42A-42C). Finally, a similar cardiac phenotype could also be detected in myeloid-specific, Tet2-deficient mice that were infused with Ang II (FIGS. 43A-43C), consistent with observations in other models of myocardial dysfunction (9).

[0493] The next series of Ang II-infusion experiments involved mice transplanted with HSPC that underwent Tet2 editing using the lentivirus/CRISPR (clustered regularly interspaced short palindromic repeats) system (FIGS. 39A-39B). Similar to mice subjected to the conventional, competitive bone marrow transplantation with Tet2-KO cells, mice transplanted with CRISPR-edited HSPC displayed greater reductions in cardiac function as determined by echocardiography (FIG. 35E). These mice also displayed an increase in cardiac mass, cardiac fibrosis, and cardiac myocyte cross-sectional area (FIGS. 35F-35H and FIG. 42B). Histological analyses also revealed greater kidney fibrosis in mice that were implanted with the CRISPR-edited HSPC (FIGS. 44A-44B).

[0494] CRISPR/Cas9-Mediated Hematopoietic Dnmt3a Gene Disruption Promotes Cardiac Dysfunction

[0495] Having demonstrated that the lentivirus/CRISPR/Ang II system can be used to analyze the role of clonal hematopoiesis in CVD processes, mice with Dnmt3a (DNA [cytosine-5]-methyltransferase 3a)-edited HSPC were evaluated in the Ang II model. The validation of guide RNA targeting Dnmt3a was performed using the T7 endonuclease I mismatch cleavage assay and immunoblotting (FIG. 38D-38E). Consistent with previous reports (11-13), Dnmt3a-disrupted HSPCs did not undergo selective expansion during the 4-month time course of these experiments (FIG. 36A). Thus, a relatively low level of chimerism, similar to that of nonedited cells, was observed in the peripheral blood populations. To determine the status of Dnmt3a editing by the lentivirus vector, sequencing of the Dnmt3a locus was performed on DNA isolated from GFP-positive white blood cells. All sequence reads revealed out-of-frame mutations (3n+1, 3n+2), which lead to premature stop codons in exon 17 of Dnmt3a gene (FIG. 36B) and a loss of enzymatic activity (14). Mice transplanted with Dnmt3a-edited HSPC showed a reduction in cardiac function by echocardiographic analysis and an increase in cardiac mass 8 weeks after systemic Ang II administration (FIGS. 36C-36D). Mice receiving Dnmt3a-edited HSPC also displayed greater cardiac fibrosis and greater cardiac myocyte cross-sectional area in tissue sections (FIGS. 36E-36F; FIG. 42C). The Dnmt3a-edited HSPC condition led to greater renal fibrosis (FIGS. 44A-44B).

[0496] Dnmt3a Disruption Enhances Inflammation

[0497] The recruitment and activation of peripheral myeloid cells contributes to cardiac dysfunction in the Ang II infusion model (15,16). To address the role of Dnmt3a gene disruption in myeloid cells, Dnmt3a-deficient J774.1 myeloid cell line using the lentivirus/CRISPR system was established. After sorting and amplification, GFP-positive cells displayed a marked reduction in Dnmt3a protein expression by immunoblotting (FIG. 37A). Using the same system, Tet2 deficiency was also established in J774.1 cells for comparative analyses. Consistent with our previous results, Tet2 disruption led to increased inflammatory chemokine/cytokine transcript expression after lipopolysaccharide stimulation. 8,9 Dnmt3a deficiency in J774.1 cells also displayed greater inflammatory responses after lipopolysaccharide stimulation (FIG. 37B). However, the patterns of inflammatory mediator induction in the Dnmt3a− and Tet2− deficient states differed. Whereas IL (interleukin)-6 and Ccl5 were similarly induced in both conditions, IL-1β was significantly upregulated in Tet2-edited cells, but there was only a trend in Dnmt3a-edited cells. Conversely, Cxcll (CXC chemokine ligand) and Cxcl2 were upregulated only in Dnmt3a-deficient cells compared with the control condition.

[0498] Consistent with observations of greater inflammatory responses in the Dnmt3a-deficient state, greater macrophage accumulation was observed in the myocardium after Ang II in-fusion (FIG. 37C). This was accompanied by elevated levels of transcripts of immune cell markers, including CD68, CD3e, CD4, and CD8, demonstrating that hematopoietic Dnmt3a deficiency leads to an increase in myocardial inflammation (FIG. 37D).

TABLE 5
Forward primers used for quantitative PCR analysis.

| Gene name | Species | Sequence |
|---|---|---|
| 36b4 | Mus Musculus | 5′-GCTCCAAGCAGATGCAGCA-3′ (SEQ ID No: 85) |
| 1l-1 b | Mus Musculus | 5′-TGACAGTGATGAGAATGACCTGTTC-3′ (SEQ ID No: 71) |
| 1l-6 | Mus Musculus | 5′-GCTACCAAACTGGATATAATCAGGA-3′ (SEQ ID No: 73) |
| 1l-1 8 | Mus Musculus | 5′-CAAACCTTCCAAATCACTTCCT-3′ (SEQ ID No: 89) |
| Tnf | Mus Musculus | 5′-CGGAGTCCGGGCAGG-3′ (SEQ ID No: 75) |
| Cxcll | Mus Musculus | 5′-CCGAAGTCATAGCCACACTCAA-3′ (SEQ ID No: 90) |
| Cxcl2 | Mus Musculus | 5′-TGACTTCAAGAACATCCAGAGCTT-3′ (SEQ ID No: 91) |
| Ccl5 | Mus Musculus | 5′-CAGCAGCAAGTGCTCCAATC-3′ (SEQ ID No: 79) |
| Cd68 | Mus Musculus | 5′-GGACTACATGGCGGTGGAATAC-3′ (SEQ ID No: 92) |
| Cd3e | Mus Musculus | 5′-AACACGTACTTGTACCTGAAAGC-3′ (SEQ ID No: 93) |
| Cd4 | Mus Musculus | 5′-TCCTTCCCACTCAACTTTGC-3′ (SEQ ID No: 94) |
| Cd8 | Mus Musculus | 5′-GCTCAGTCATCAGCAACTCG-3′ (SEQ ID No: 95) |

TABLE 6
Reverse primers used for quantitative PCR analysis.

| Gene name | Species | Sequence |
|---|---|---|
| 36b4 | Mus Musculus | 5′-CCGGATGTGAGGCAGCAG-3′ (SEQ ID No: 86) |
| 1l-1 b | Mus Musculus | 5′-TTGGAAGCAGCCCTTCATCT-3′ (SEQ ID No: 72) |
| 1l-6 | Mus Musculus | 5′-CCAGGTAGCTATGGTACTCCAGAA-3′ (SEQ ID No: 74) |
| 1l-1 8 | Mus Musculus | 5′-TCCTTGAAGTTGACGCAAGA-3′ (SEQ ID No: 96) |
| Tnf | Mus Musculus | 5′-GCTGGGTAGAGAATGGATGAA-3′ (SEQ ID No: 76) |
| Cxcll | Mus Musculus | 5′-CAAGGGAGCTTCAGGGTCAA-3′ (SEQ ID No: 97) |
| Cxcl2 | Mus Musculus | 5′-CTTGAGAGTGGCTATGACTTCTGTCT-3′ (SEQ ID No: 98) |
| Ccl5 | Mus Musculus | 5′-CACACACTTGGCGGTTCCTT-3′ (SEQ ID No: 80) |
| Cd68 | Mus Musculus | 5′-GAGAGCAGGTCAAGGTGAACAG-3′ (SEQ ID No: 99) |
| Cd3e | Mus Musculus | 5′-GATGATTATGGCTACTGCTGTCA-3′ (SEQ ID No: 100) |
| Cd4 | Mus Musculus | 5′-AAGCGAGACCTGGGGTATCT-3′ (SEQ ID No: 101) |
| Cd8 | Mus Musculus | 5′-ATCACAGGCGAAGTCCAATC-3′ (SEQ ID No: 102) |

[0499] Studies have associated the clonal expansion of HSPC with mortality and increased CVD risk (4, 5, 7) Clonal hematopoiesis can be caused by somatic mutations in >40 candidate driver genes, and it is likely that these different drivers will confer gene-specific effects on pathological processes. To date, studies focused on Tet2, which functions to promote a DNA hydroxymethylation and to recruit histone deacetylases to gene regulatory sequences (2) have provided the only evidence that these somatic mutations can causally contribute to CVD. Given the challenge of evaluating many other driver genes, we have developed procedures to facilitate the analysis of clonal hematopoiesis in CVD. The described system uses lentiviral vectors to transduce HSPC and CRISPR methodology to create indel mutations in candidate driver gene. Although off-target mutations are a potential concern, this system allows the ex vivo manipulation of HSPC that can then be implanted into wild-type mice and thereby provide a more versatile and rapid approach to assess HSPC clonal expansion and its systemic consequences than the conventional murine transgenic/knockout technology. Similar techniques have been used to edit driver genes in a model of myeloid malignancy (17). To evaluate CVD, gene-edited mice were infused with Ang II-a peptide hormone involved in the pathologies of vascular, renal, and cardiac diseases. 18 Under these conditions, CRISPR-mediated indels in Tet2 of HSPC led to the expansion of mutant cells and worsened cardiac remodeling, serving to validate the system and extend our prior findings (8, 9).

[0500] This technology was applied to evaluate the consequences of inactivating mutations in Dnmt3a. This protein is a de novo DNA methyltransferase, and it is ex-pressed in long-term HSPC (19). Here, we show that lentivirus/CRISPR-mediated disruption of hematopoietic Dnmt3a results in greater cardiac hypertrophy, diminished ejection fraction, and increased fibrosis after Ang II administration. Cardiac dysfunction was associated with greater macrophage accumulation and the elevated expression of immune cell markers in the myocardium. Consistent with previous studies on Tet (2, 8, 9) these effects tended to be observed late in the course of the pathological process, demonstrating that clonal hematopoiesis impairs the resolution of inflammation. In cell culture studies, the inactivation of either Dnmt3a or Tet2 led to increased cytokine expression, but the effects differed qualitatively and quantitatively demonstrating that they confer gene-specific effects resulting from mechanistic differences between these 2 proteins.

[0501] As demonstrated herein, inactivating mutations in Dnmt3a and Tet2 lead to markedly different HSPC expansion characteristics. The robust expansion of Tet2-deficient cells into multiple blood cell lineages was observed after the implantation of CRISPR-edited HSPC, and these results are consistent with observations from experiments that using a competitive transplantation approach using a 1:9 ratio of Tet2-KO: wild-type bone marrow (8, 9) (FIGS. 34A-34D and FIGS. 39A-39B). In contrast, there was no detectable expansion of Dnmt3a-deficient peripheral blood cells over the time course of our study. This finding is consistent with previous reports showing that Dnmt3a-null HSPCs are observed to expand in aged mice or only after sequential bone marrow transplantations (12, 13, 20). Although Dnmt3a and Tet2 appeared to similarly affect cardiac pathology in the Ang II model, the lack of Dnmt3a-deficient hematopoietic cell expansion demonstrates that Dnmt3a may be more potent than Tet2 in promoting CVD.

[0502] In the current study, we show that Dnmt3a deficiency can alter the function of myeloid cells and promote the inflammation via the upregulation of specific cytokines and chemokines. These findings demonstrate that Dnmt3a-mediated clonal hematopoiesis are causally associated with CVDs by promoting prolonged inflammatory responses in myeloid cells.

### REFERENCES

[0503] 1. Vijg J. Somatic mutations, genome mosaicism, cancer and aging. Curr Opin Genet Dev. 2014; 26:141-149.
[0504] 2. Fuster J J Walsh K. Somatic mutations and clonal hematopoiesis: unexpected potential new drivers of age-related cardiovascular disease. Circ Res. 2018; 122:523-532.
[0505] 3. Steensma D P, Bejar R, Jaiswal S, Lindsley R C, Sekeres M A, Hasserjian R P, Ebert B L. Clonal hematopoiesis of indeterminate potential and its distinction from myelodysplastic syndromes. Blood. 2015; 126:9-16.
[0506] 4. Jaiswal S, Fontanillas P, Flannick J, et al. Age-related clonal hematopoiesis associated with adverse outcomes. N Engl J Med. 2014; 371:2488-2498.
[0507] 5. Genovese G, Kaihler A K, Handsaker R E, et al. Clonal hematopoiesis and blood-cancer risk inferred from blood DNA sequence. N Engl J Med. 2014; 371:2477-2487.
[0508] 6. Zink F, Stacey S N, Norddahl G L, et al. Clonal hematopoiesis, with and without candidate driver mutations, is common in the elderly. Blood. 2017; 130:742-752.
[0509] 7. Jaiswal S, Natarajan P, Silver A J, et al. Clonal hematopoiesis and risk of atherosclerotic cardiovascular disease. N Engl J Med. 2017; 177:111-121.
[0510] 8. Fuster J J, MacLauchlan S, Zuriaga M A, et al. Clonal hematopoiesis associated with TET2 deficiency accelerates atherosclerosis development in mice. Science. 2017; 355:842-847.
[0511] 9. Sano S, Oshima K, Wang Y, MacLauchlan S, Katanasaka Y, Sano M, Zuriaga M A, Yoshiyama M, Goukassian D, Cooper M A, Fuster J J, Walsh K. Tet2-mediated clonal hematopoiesis accelerates heart failure through a mechanism involving the IL-1β/NLRP3 inflammasome. J Am Coll Cardiol. 2018; 71:875-886.
[0512] 10. Xie M, Lu C, Wang J, et al. Age-related mutations associated with clonal hematopoietic expansion and malignancies. Nat Med. 2014; 20:1472-1478.
[0513] 11. Jeong M, Park H J, Celik H, Ostrander E L, Reyes J M, Guzman A, Rodriguez B, Lei Y, Lee Y, Ding L, Guryanova O A, Li W, Goodell M A, Challen G A. Loss of Dnmt3a immortalizes hematopoietic stem cells in vivo. Cell Rep. 2018; 23:1-10. doi: 10.1016/j.celrep.2018.03.025.
[0514] 12. Challen G A, Sun D, Jeong M, et al. Dnmt3a is essential for hematopoietic stem cell differentiation. Nat Genet. 2011; 44:23-31.
[0515] 13. Cole C B, Russler-Germain D A, Ketkar S, et al. Haploinsufficiency for DNA methyltransferase 3A predisposes hematopoietic cells to myeloid malignancies. J Clin Invest. 2017; 127:3657-3674.
[0516] 14. Yang L, Rau R, Goodell M A. DNMT3A in haematological malignancies. Nat Rev Cancer. 2015; 15:152-165.
[0517] 15. Epelman S, Lavine K J, Beaudin A E, et al. Embryonic and adult-derived resident cardiac macrophages are maintained through distinct mechanisms at steady state and during inflammation. Immunity. 2014; 40:91-104.
[0518] 16. Hulsmans M, Sam F, Nahrendorf M. Monocyte and macrophage contributions to cardiac remodeling. J Mol Cell Cardiol. 2016; 93:149-155.
[0519] 17. Heckl D, Kowalczyk M S, Yudovich D, Belizaire R, Puram R V, McConkey M E, Thielke A, Aster J C, Regev A, Ebert B L. Generation of mouse models of myeloid malignancy with combinatorial genetic lesions using CRISPR-Cas9 genome editing. Nat Biotechnol. 2014; 32:941-946.
[0520] 18. Danilczyk U, Penninger J M. Angiotensin-converting enzyme II in the heart and the kidney. Circ Res. 2006; 98:463-471.
[0521] 19. Li X, Zhang Q, Ding Y, Liu Y, Zhao D, Zhao K, Shen Q, Liu X, Zhu X, Li N, Cheng Z, Fan G, Wang Q, Cao X. Methyltransferase Dnmt3a upregulates HDAC9 to deacetylate the kinase TBK1 for activation of antiviral innate immunity. Nat Immunol. 2016; 17:806-815.
[0522] 20. Zhang X, Su J, Jeong M, Ko M, Huang Y, Park H J, Guzman A, Lei Y, Huang Y H, Rao A, Li W, Goodell M A. DNMT3A and TET2 compete and cooperate to repress lineage-specific transcription factors in hematopoietic stem cells. Nat Genet. 2016; 48:1014-1023.
[0523] 21. Leoni C, Montagner S, Rinaldi A, Bertoni F, Polletti S, Balestrieri C, Monticelli S. Dnmt3a restrains mast cell inflammatory responses. Proc Natl Acad Sci USA. 2017; 114:E1490-E1499.
[0524] 22. Yang F, Zhou S, Wang C, Huang Y, Li H, Wang Y, Zhu Z, Tang J, Yan M. Epigenetic modifications of interleukin-6 in synovial fibroblasts from osteoarthritis patients. Sci Rep. 2017; 7:43592. doi: 10.1038/srep43592.

[0525] Materials and Methods

[0526] Plasmids and lentivirus production: pSpCas9(BB)-2A-Puro (PX459) V2.0 was a gift from Feng Zhang (Addgene plasmid #62988). LentiCRISPRv2GFP was as gift from David Feidser (Addgene plasmid #82416). psPAX2 and pMD2.G was a gift from Didier Trono (Addgene plasmid #12260 and 12259). Small gRNA sequences targeting to mouse Dnmt3a (5′-gtgggcatggtgcggcacca-3′ SEQ ID NO: 103) and Tet2 (5′-gaacaagctctacatcccgt-3′ SEQ ID NO: 104) were individually subcloned into the vector with BsmBI restriction enzyme and lentivirus particles were generated as described 1, 2. Briefly, the plasmids (LentiCRISPRv2GFP-sgRNA, psPAX2, pMD2.G) were co-transfected to HEK293T cells with polyethylenimine and the supernatant was collected 48 hours after transfection. After filtration (0.45 μm), virus particles were concentrated by ultracentrifugation at the speed of 20,000 rpm for 3 hours. The virus pellet was suspended with StemSpan medium and kept at −80° C. Lentiviral particle titer was determined using Lenti-XTM qRT-PCR Titration Kit (Clontech).

[0527] Validation of gRNA. NI H-3T3, HEK293T and J774.1 cells were purchased from ATCC and Sigma Aldrich, respectively. The cells were cultured in DMEM supplemented with 10% fetal bovine serum with penicillin and streptomycin at 37° C. Three guide RNAs for each gene were screened for activity in NI H-3T3 cells. J774.1 cells were transduced with the lentivirus particles (with or without gRNAs). After culturing for at least 72 h, GFP positive cells were collected with FACSAria (BD Bioscience) and used in subsequent experiments.

[0528] Isolation of lineage-negative cells and lentivirus transduction. Lineage-negative cells were isolated from bone marrow of C57BL/6J wild type mice using the Lineage-depletion kit (Miltenyi Biotech) according to manufactures instructions. Cells were pre-incubated with the StemSpan medium for 1.5 hours at 37° C. Lentivirus transduction was performed in the presence of 20 ng/mL of TPO, 50 ng/mL of SCF-1, 4 μg/ml of polybrene, and 5 μg/ml of rapamycin for 16-20 hours. Cells were washed and re-suspended with RPMI medium before transplantation.

[0529] Mice. C57BL/6J Tet2-deficient mice, C57BL/6J Tet2 floxed mice, C57BL/6J LysM-Cre mice, C57BL/6 wild type mice, and C57BL/6 Cd45.1 Pep Boy mice were obtained from Jackson Laboratories as described previously 3. Male mice were used for all in vivo experiments. The Institutional Animal Care and Use Committee (IACUC) of Boston University and the Institutional ACAC at the University of Virginia approved all study protocols.

[0530] Bone marrow transplantation. For competitive transplantation, lethally irradiated CD45.1+ mice were transplanted with bone marrow cells containing 10% CD45.2+ Tet2−/− cells and 90% CD45.1+ Tet2+/+ cells (10% Tet2-KO mice) or 10% CD45.2+ Tet2−/− cells and 90% CD45.1+ Tet2+/+ cells (10% WT mice). For lineage-negative cell transplantation, lentivirus-transduced cells (5×105 cells/mouse) were retro-orbitally injected into lethally irradiated 8 week old C57BL/6 wild type mice. The 10% competitive bone marrow transplantation was performed as described previously 3. Briefly, 8 week old lethally irradiated C57BL/6 Cd45.1 Pep Boy recipient mice were transplanted with bone marrow cells containing 10% Cd45.2+ Tet2−/− cells and 90% Cd45.1+ Tet2+/+ cells or 10% Cd45.2+ Tet2+/+ cells and 90% Cd45.1+ Tet2+/+ cells (defined as 10% Tet2 KO-BMT mice and 10% WT-BMT mice, respectively). In these experiments, 5×106 of total cells were injected. In both models, recipient mice were exposed to two radiation doses of 450 rad 4 hours apart using an X-RAD 320 Biological Irradiator.

[0531] Flow cytometry Bone marrow cells were flushed out from femur and red blood cells were lysed with 1×RBC Lysis Buffer (eBioscience™) for 5 minutes on ice. For hematopoietic stem cell staining, cells were labeled with biotin-conjugated anti-mouse antibodies against CD11b, Gr-1, Ter-119, CD45R/B220, CD3e, and CD 127, followed by a labeling with an anti-biotin PE-conjugated streptavidin antibody and antibodies against c-kit, Sca-1, CD48, and CD150 (see also table 7).

TABLE 7
Flow cytometry antibodies used.

| Antigen | Clone | Conjugation | Supplier | Identifier |
|---|---|---|---|---|
| BM HSPC | | | | |
| CD11b | M1/70 | Biotin | BioLegend | #101203 |
| Gr-1 | RB6-8C5 | Biotin | BioLegend | #108403 |
| Ter119 | Ter-119 | Biotin | BioLegend | #116203 |
| CD45R/ | RA 3-6 B 2 | Biotin | BioLegend | #103203 |
| B220 | | | | |
| CD3e | 145-2C11 | Biotin | BioLegend | #100303 |
| CD127 | A7R34 | Biotin | BioLegend | #135005 |
| Streptavidin | — | BV650 | BioLegend | #405231 |
| c-Kit | 2B8 | PE | BioLegend | #105807 |
| Sca 1 | D7 | PE-Cy7 | BioLegend | #108114 |
| CD48 | HM48-1 | BV421 | BioLegend | #103427 |
| CD150 | TC15-12F12.2 | PerCP/Cy5.5 | BioLegend | #115921 |
| Peripheral | | | | |
| blood | | | | |
| CD45 | 30-F11 | PE-Cy7 | eBioscience | #25-0451- |
| | | | | 82 |
| CD115 | AFS98 | PE | eBioscience | #12-1152- |
| | | | | 82 |
| CD3e | 145-2C11 | APC-Cy7 | eBioscience | #17-0031- |
| | | | | 81 |
| Gr-1 | 1A8 | PerCP-Cy5.5 | BD Biosciences | #560602 |
| CD45R/ | RA 3-6 B 2 | APC-Cy7 | BD Biosciences | #552094 |
| B220 | | | | |

[0532] Peripheral blood cells were lysed with 1×RBC Lysis Buffer (eBioscience™) for 5 minutes on ice. After Fc blocking, cells were stained with following antibodies against CD45, CD115, Gr-1, CD45/B220, CD3e. Dead cells were excluded from analysis by DAPI staining. The detailed list of antibodies used in this study are shown in the Online Table 1. For data acquisition, BD LSR II Flow Cytometer (BD Bioscience) was used. Cells were defined as described in FIG. 1a (bone marrow hematopoietic stem cell) and Online FIG. 4 (peripheral blood cells). Data were analyzed with FlowJo Software.

[0533] Angiotensin-II infusion model. 1.5 mg/kg/min of human AngII (Sigma Aldrich) was infused subcutaneously by Alzet mini-osmotic pumps (Model 2004, Durect Corp.) to bone marrow-reconstituted mice for a period of 4 weeks. At this point, pumps were replaced to allow a continuous infusion for the entire duration of the study. Control mice were infused with PBS.

[0534] Echocardiography. Cardiac function was assessed before and after the AngII administration, at indicated in time points, using Vevo2100 ultrasound system equipped with MS550D probe (VisualSonics, Fujifilm). Mice were anesthetized with isoflurane at a concentration of 5% (induction) and 1% (maintenance). Each animal was placed on the heating table in a supine position. The chest was shaved using chemical hair remover, and ultrasound gel was applied to the thorax surface to optimize the visibility of the cardiac chambers. Fractional shortening (FS, %) was measured from M-mode images obtained by short-axis view visualizing both papillary muscles. Measurements were performed by an individual who was blinded to the identity of the experimental groups of mice.

[0535] Histology. Hearts were perfused with cold PBS from apex and fixed in 10% formalin overnight and processed for paraffin embedding. 7-pm-thick sections were de-paraffinized, rehydrated. For Picrosirius red staining, sections were incubated with freshly prepared staining buffer (1.2%/w picric acid in water, 0.1%/w Fast Green FCF and 0.1%/w Direct Red 80 solved in PBS) for 1 hour at room temperature (all products from Sigma-Aldrich). Sections were washed briefly in distilled H2O and dehydrated. The slides were mounted by coverslip using Permount mounting medium (Fisher Scientific). The images were analyzed by ImageJ software (NI H) for quantification of fibrosis. Myocardial fibrosis size was expressed as a percentage of total LV area. To measure cardiomyocyte cross-sectional area (CSA), heart sections were stained using Alexa Fluor 488 conjugated-WGA (Life Technologies). An operator who was blinded to mouse genotype quantified cardiomyocyte CSA by computer-assisted morphometric analysis of microscopy images acquired on a Keyence BZ-9000 microscope. The average CSA of randomly selected 50-80 round-shaped cardiomyocytes per each sample was used for analysis. For Mac2 immunohistochemistry staining, antigen unmasking was performed by boiling slides in citric acid buffer (Vector Laboratories, Inc.). Endogenous peroxidase was inactivated by using 0.3% H2O2for 30 min. Sections were blocked 5% horse serum for 1 hour and then incubated with anti-rabbit Mac2 antibody (clone H-160, catalog #sc-20157, Santa Cruz) at 1:500 dilution at 4° C. overnight. After washing slides, sections were incubated anti-rabbit IgG conjugated with peroxidase (Vector Laboratories, Inc.) for 30 minutes and developed using DAB substrate kit (Vector Laboratories, Inc.). Sections were counterstained with Harris hematoxylin. The number of Mac2 positive cell was counted in five high-power fields per section and per animal. For morphologic evaluation of the kidney, specimens were fixed in 10% formalin, paraffin embedded and sectioned at 7 μm. Masson's trichrome staining was performed according to the manufacturer's instructions (Sigma-Aldrich). Interstitial fibrosis was assessed at 200× original magnification with 10 randomly selected fields for each animal. The images were analyzed by Image J software (NI H) for quantification of fibrosis.

[0536] Quantitative PCR analysis. Total RNA from tissues and cultured cells was isolated using QIAzol reagent (Qiagen) and NucleoSpin RNA Kit (Clontech). RNA (0.7-1.0 Ng) was reverse transcribed with High-capacity RNA-to-cDNA Kit (Thermo Fisher Scientific). qRT-PCR was performed with Power SYBR® Green reagent (Thermo Fisher Scientific) in a ViiA7 PCR system. The list of primers for mouse gene expression studies are shown in the table 5 and 6. Results were analyzed with the AACt method. 36b4 was used as reference genes for normalization.

[0537] Statistics. Data were shown as mean±SEM, or median (minimum to maximum). Data distribution was evaluated by Shapiro-Wilk normality test. An F-test was used to evaluate homogeneity of variance. Statistical significance of differences in experiments with two groups and only one independent variable was assessed by two-tailed unpaired Student's t tests (normally distributed data with equal variance) or Mann-Whitney U Tests (non-normally distributed data). Differences in experiments with more than one independent variable were evaluated by two-way ANOVA, with post-hoc Sidak's or Tukey's multiple comparison tests. Results of echography and peripheral blood flow cytometry were assessed by two-way repeated measure ANOVA with post-hoc Sidak's or Tukey's multiple comparison tests. *p<0.0⁵, **p<0.01, ***p<0.001, ****p<0.0001. All statistical analyses were performed using GraphPad Prism 7 software (GraphPad Software Inc.).

### REFERENCES FOR MATERIALS AND METHODS

[0538] Heckl D, Kowalczyk M S, Yudovich D, Belizaire R, Puram R V, McConkey M E, Thielke A, Aster J C, Regev A and Ebert B L. Generation of mouse models of myeloid malignancy with combinatorial genetic lesions using CRISPR-Cas9 genome editing. Nat Biotechnol. 2014; 32:941-6.
[0539] Walter D M, Venancio O S, Buza E L, Tobias J W, Deshpande C, Gudiel A A, Kim-Kiselak C, Cicchini M, Yates T J and Feldser D M. Systematic In Vivo Inactivation of Chromatin-Regulating Enzymes Identifies Setd2 as a Potent Tumor Suppressor in Lung Adenocarcinoma. Cancer Res. 2017; 77:1719-1729.
[0540] Sano S, Oshima K, Wang Y, MacLauchlan S, Katanasaka Y, Sano M, Zuriaga M A, Yoshiyama M, Goukassian D, Cooper M A, Fuster J J and Walsh K. Tet2-Mediated Clonal Hematopoiesis Accelerates Heart Failure Through a Mechanism Involving the IL-1beta/NLRP3 Inflammasome. J Am Coll Cardiol. 2018; 71:875-886.

What is claimed herein is:

1. A method for treating a subject having, or at risk for, a HSC (hematopoietic stem cell) cardiometabolic driver gene mutation-mediated proinflammatory disease comprising: administering a therapeutically effective amount of a pharmaceutical composition comprising an inhibitor of HSC cardiometabolic driver gene mutation-mediated proinflammatory activity and a pharmaceutically acceptable carrier to a subject having one or more somatic mutations in one or more HSC cardiometabolic driver gene in a sub-population of peripheral blood hematopoietic cells.

2. The method of claim 1, wherein at least 2% of the peripheral blood hematopoietic cells have the one or more somatic mutations in the one or more HSC cardiometabolic driver genes.

3. The method of claim 1, wherein the one or more HSC cardiometabolic driver genes are selected from TP53, JAK2, DNMT3A, ASXL1, TET2, and PPM1D/WIP1.

4. The method of claim 3, wherein the one or more somatic mutations are in TP53 and are selected from a G743A mutation in SEQ ID NO:2 and a A659G mutation in SEQ ID NO: 2.

5. The method of claim 3, wherein the one or more somatic mutations are in JAK2 and is a G1849T in SEQ ID NO: 56.

6. The method of claim 3, wherein the one or more somatic mutations are in DNMT3A and are selected from a T1115C mutation in SEQ ID NO: 37; a C2711T mutation in SEQ ID NO: 37; a C1837G mutation in SEQ ID NO: 37; a A1666G mutation in SEQ ID NO: 37; a C1789T mutation in SEQ ID NO: 37; a G2719A mutation in SEQ ID NO: 37; a G1627T mutation in SEQ ID NO: 37; an A2723G mutation in SEQ ID NO: 37; a G1797T mutation in SEQ ID NO: 37; a T2252G mutation in SEQ ID NO: 37; a C1560A mutation in SEQ ID NO: 37; a T1031C mutation in SEQ ID NO: 37; a G2645A mutation in SEQ ID NO: 37; a C2043G mutation in SEQ ID NO: 37; a C2446T mutation in SEQ ID NO: 37; a A2198G mutation in SEQ ID NO: 37; A2281G mutation in SEQ ID NO: 37; a C920G mutation in SEQ ID NO: 37; a A2204G mutation in SEQ ID NO: 37; and a frameshift mutation in DNMT3A.

7. The method of claim 3, wherein the one or more somatic mutations are in ASXL 1 and are selected from a C2407T mutation in SEQ ID NO: 61; a C2893T mutation in SEQ ID NO: 61; a 1926_1926delinsAG mutation in SEQ ID NO: 61; and a frameshift mutation in ASXL1.

8. The method of claim 3, wherein the one or more somatic mutations are in PPM1D and are selected from a G1618T mutation in SEQ ID NO: 64; a C1372T mutation in SEQ ID NO: 64; and a frameshift mutation in PPM1D.

9. The method of claim 3, wherein one or more somatic mutations are in TET2 and are selected from an S282F mutation in SEQ ID NO: 68, an N312S mutation in SEQ ID NO: 68, an L346P mutation in SEQ ID NO: 68, an S460F mutation in SEQ ID NO: 68, a D666G mutation in SEQ ID NO: 68, a P941S mutation in SEQ ID NO: 68, and a C1135Y mutation in SEQ ID NO: 68.

10. The method of claim 1, wherein the inhibitor of HSC cardiometabolic driver gene mutation-mediated proinflammatory activity is an IL-1β inhibitor, an IL-1β inhibitor antibody or antigen-binding fragment thereof that binds to IL-1β and reduces IL-1β binding to its receptor(s), an IL-1 receptor antagonist, or a small molecule or microRNA inhibitor that inhibits IL-1β-mediated pro-inflammatory activity.

11. The method of claim 10, wherein the IL-1β inhibitor antibody or antigen-binding fragment thereof is selected from ABT981, an anti-interleukin-1β inhibitor antibody by ABZYME, APX002, Canakinumab/Ilaris, CDP48, immunereszumab, LY2189102, MEDI8968, and XOMA052.

12. The method of claim 10, wherein the IL-1 receptor antagonist is selected from CDP484, CP412245, CYT013 IL1bQb, XL 130, AMG108, HL 2351, IL1Hyl, AXXO, orthokine, PRT 1000, anakinra, and rilonacept.

13. The method of claim 10, wherein the small molecule or microRNA inhibitor is selected from AC201, CP412245, MCC950 or CRID3, inflabion, inflammasome modulator OPSONA, PGE3935199, PGE527667, TRK530, β-hydroxybutyrate (BHB), and microRNA-223.

14. The method of claim 1, wherein the inhibitor of HSC cardiometabolic driver gene mutation-mediated proinflammatory activity is an IL-6 inhibitor, an IL-6 inhibitor antibody or antigen-binding fragment thereof that binds to IL-6 and reduces IL-6 binding to its receptor(s), an IL-6 receptor antagonist, a small molecule or microRNA IL-6 inhibitor, or a JAK-STAT inhibitor.

15. The method of claim 14, wherein the IL-6 inhibitor antibody or antigen-binding fragment thereof is selected from Siltuximab, Olokizumab, Elsilimomab, mAb 1339, Sirukumab, Clazakizumab, ARGX-109, FM101, and C326.

16. The method of claim 14, wherein the IL-6 receptor antagonist is selected from tocilizumab, sarilumab, REGN88, FE301, and LMT-28.

17. The method of claim 14, wherein the small molecule IL-6 inhibitor is ALX-0061 or LMT-28.

18. The method of claim 14, wherein the JAK-STAT inhibitor is selected from baricitinib, decernotinid, filgotinib, INCB-039110, ruxolitinib, tofacitinib, Oclacitinib, Gandotinib, Lestaurtinib, Momelotinib, Pacritinib, PF-04965842, Upadacitinib, and Peficitinib.

19. The method of claim 1, wherein the inhibitor of HSC cardiometabolic driver gene mutation-mediated proinflammatory activity is a TNFα inhibitor, a TNFα inhibitor antibody or antigen-binding fragment thereof that binds to TNFα and reduces TNFα binding to its receptor(s), a TNFα receptor antagonist, or a small molecule or microRNA TNFα inhibitor.

20. The method of claim 19, wherein the TNFα inhibitor antibody or antigen-binding fragment thereof is selected from adalimumab, Adalimumab-atto, certolizumab pegol, golimumab, infliximab,

21. The method of claim 19, wherein the TNFα receptor antagonist is etanercept.

22. The method of claim 1, further comprising monitoring hematopoietic cell clonality, IL-1β proinflammatory activity, IL-6 proinflammatory activity, TNFα proinflammatory activity or any combination thereof following the administration of the inhibitor of HSC cardiometabolic driver gene mutation-mediated proinflammatory activity.

23. The method of claim 1, further comprising decreasing the number or percentage of hematopoietic cells comprising the one or more somatic mutations in the one or more HSC cardiometabolic driver genes in the subject by performing therapeutic cytapheresis on the subject.

24. The method of claim 1, further comprising administering one or more additional therapeutic agents to the subject.

25. The method of claim 1, wherein the HSC cardiometabolic driver gene mutation-mediated proinflammatory disease is a cardiometabolic or chronic kidney disease or disorder.

26. A method for treating a subject having, or at risk for, a HSC cardiometabolic driver gene mutation-mediated proinflammatory disease comprising:
(a) sequencing a hematopoietic cell sample from a subject to identify one or more somatic mutations in one or more HSC cardiometabolic driver genes in the hematopoietic cell sample; and
(b) administering a therapeutically effective amount of a pharmaceutical composition comprising an inhibitor of HSC cardiometabolic driver gene mutation-mediated proinflammatory activity and a pharmaceutically acceptable carrier if one or more somatic mutations in one or more HSC cardiometabolic driver genes are identified in the hematopoietic cell sample.

27. The method of claim 26, wherein the hematopoietic cell sample is a peripheral blood hematopoietic cell sample or enriched for myeloid-derived cells.

The application's sequence listing, which the Patent Office published only in electronic form, follows.

SEQUENCE LISTING (115 sequences)

SEQ ID NO: 1 - DNA, 32772 bp, Homo sapiens
ctccttggttcaagtaattctcctgcctcagactccagagtagctgggattacaggcgcccgccaccacgcccagctaattttttgtatttttaatagagatggggtttcatcatgttggccaggctggtctcgaactcctgacctcaggtgatccacctgcctcagcctcccaaagtgctgggattacaggagtcagccaccgcacccagccccaactaatttttgtatttgagtagagacagggttttaccatgttggccaggctggtctaaaactcttcacctcaggtgatccacccatctcagcctcccaaagtgttgggattacaggcgtgagccaccgtgcctggccctggatttcactcttgcccacccataaaccattcactcttctgttttaaaactctcttggccgggcgcagtggctcatgcctgtaatcccagcactttgggaggccaaggtgggcagatcacaaggtcaggagttcgagaccagcctggccaatatgatgaaccccccatctctactaaaaaaatacaaaaaaattagccgggtgtggtggcacatgcctgtaatcccagctactcggaaggttgaggcaggagaatcacttaaacctgggaggcggaggttgcggtgagctgagatggtgccactgcactccagcctggacaacagagcaagactctgtctcaaacaaacaaacaaaaaaaacctctctcatggcctggcatggtggctcacgcctgtaatcctagcactttggaaggctgaggcaggtggatcacctgaggtcaggagtttgagaccagccaggccaacgtggcaaaacctgtctctactaaaaatacaaaaattaagccaggcgcggtggctcatgcctataatcccagcactttgggaggccgagaccggcggatcaaatgtcaggagtacgagaccatcctggccaatatggtaaaaccccgtctctatttaaaaaaatacaaaaattagctgggcatggtggcgggtgcctgtaatcccagctactcgggaggctgaggcaggagaatcgcttgaatccaggaggcagaggttgcagtgagccgagatcacgccattgcactccagcctgggcgacagagcaagactcgtctcaaaaaaaaaaaaaaaacacctctctcatgacttcccaaataaactccaaatgccttacccataagaaccaacacgacgtggctgctcttctctgtcctcacccctctgtccccctcacttgcctcagtctggctataccagcattctgggttttttgttttgtgtttgtttgtttgtttgtttgtttgtttgtttgttttgggatggagtctcactctgtcacccaggctggagtgcagtgacatgatcttggctcactgcaacctccatctcctgggttcaaatgattcttctgcttcagcctctcaagtagctgggattacaggcacccaccatcacacccagctaatttttgtatttttgtagagatgaggttttgccatgttggccaggctggtctcaaactcttgacctcaggtgatctgcccacctcagcctcccaaagtgctgggattacaggtgtgagccactgagcccagtctgttttgttgttttttgagatggagtctcactctgtcgcccaggctggagtgcagtggtacaattttgtctgactgcagcctccacctcctgagtttaagagattctcctgcctcagccacacaagtagctgggattacaggcgcgtgccaccacatgcgtctaattttggtatttttagtagcgatggggttttgccatattggccaggctggtctcgaactcctggcctcaagtgatctgcacacctcggcctcctgagtagctgggattacaggcgtgagccaccatgcagggcctttctggtcttttaacgcacaaagctatttcccagttctgggtgtttatagtatcattgccagttcctggaaagctctttccagaagccttcacatgactgatcccttatcctccttcaggtcttagctcaaatgcctccttttcagagagctccttcctgaccattttatgcaatgtgctttcctctagttagtctctcttcattctgtgtatttccttcagagcatttatcatcatcttggtcctgatgcttgctggtttacatgtttgttgtctgtctcccacacagaaagcaaaccagcccttcatctgtcttgtccaccactttatcccagcacagtgactaacatatatcagtagtcaatcaataaatagctataagccaggcacggtgactcacacctgtgatccccgcactttgggaggccaaggtgggcggatcctctgaggtcaggaatttgatatcagcctgcccaacatggcgaaaccccgtctctactaaaactataaaaattagtcgagtgtgatggcgtgcgcctgtaataccagctacttgtgaggctgaggcaggagaatcgcttgaacccgggaggcagaggttgcagtgagccgagatcacaccacagcactccagcctgggtgacagagcaagaccttgtctcaaaaaaataagaaatagaaatatatatatgctgccacaagaaattcactactttttagcaaaaaacacagattcctaattaaagaaaggggaaacctctctctaaataacttcagaattcggggcagaaaacgctacatgtggaaactcgtcttgaaaaacagtcccgtttgtgaacaggaaacacttggactacactttttccatctccacgaaggacttaaatgtgcagcattgatgaagaggcagttagccccagtccttaccatttctgcatattccacctgctccccctcatggtacagctctgggggcaggttataaattcgcaagatgttatcagcactattggtcaagatgcaggaaccgtcaggagccctagaaacaggggagagttagaaagctggccagacctatgcttttcaagtgtagggctagggctgagcctgcctctggggtaggtaagcccccctgaatccttgagggaagtagaagacacaaactgctagataaaatgtaagctcagtctaaaagggctacgtgccgcttctcccagctctggggcatccctctcctagaaaactggactgttttacagtgaaaatctcgggggtggtcagctccctgccccgttgttatccttaccacttacagcctttcaagaagttctcaggttgggtgctgaactctgaccaggaaccactgagaaatcgaggcagctgggagaagctgtagttccaagcgctgaaaggaagatgggggacaataaacctgggtcgccaagcaaagggggcagaggcctggagaagtgggtctcaggaccagaggacagatcgacctcacacttcatctccccagactccacactccactgccatcaccacttacgtgtctccctcgtcctctgcagcgggttccccagaggtatcttccatggcttttccagaccccaactctggcccgttcgcttcttcttcagaaaggctcccgtttgcttcttctgcaggaaggcttgtattttcagaaagttcttgctcctcgattcgaggactcaactcactaggggaaccaaactctgtttccaggggagtggagagagaaactgggtccccctcccgtagctcctgggacacagctgagccagccacaggatctggggacaaccggggcggatcccccctttcgggaggcggtggcatcagttcagagtccgcatttttattcatcggggaagcgtggggagaaggatgggctggagctgggtcctggtctgaaggacagcagtccggagctaacggttgagtctccaaagtcttcatactgcagaggaagcacagcggagattagcctcagccaggatggcttcgaagttctcagggatccgacgcagagctaaagaaacccacctgtgcttccctcctcttctgggagtaggcagaagactcccgggaggagaggcgaacagcggacgccaattcttttgaaagcactgtgttccttagcaccgcgggtcgctacgggcctcttgctgtcgcgggatttcggtccaccttccgattgggccgccgcatcccggatcagatttcgcgggcgacccacggaacccgcggagccgggacgtgaaaggttagaaggtttcccgttcccatcaagccctagggctcctcgtggctgctgggagttgtagtctgaacgcttctatcttggcgagaagcgcctacgctccccctaccgagtcccgcggtaattcttaaagcacctgcaccgcccccccgccgcctgcagagggcgcagcaggtcttgcacctcttctgcatctcattctccaggcttcagacctgtctccctcattcaaaaaatatttattatcgagctcttacttgctacccagcactgatataggcactcaggaatacaacaatgaataagatagtagaaaaattctatatcctcataaggcttacgtttccatgtactgaaagcaatgaacaaataaatcttatcagagtgataagggttgtgaaggagattaaataagatggtgtgatataaagtatctgggagaaaacgttagggtgtgatattacggaaagccttcctaaaaaatgacattttaactgatgagaagaaaggatccagctgagagcaaacgcaaaagctttcttccttccacccttcatatttgacacaatgcaggattcctccaaaatgatttccaccaattctgccctcacagctctggcttgcagaattttccaccccaaaatgttagtatctacggcaccaggtcggcgagaatcctgactctgcaccctcctccccaactccatttcctttgcttcctccggcaggcggattacttgcccttacttgtcatggcgactgtccagctttgtgccaggagcctcgcaggggttgatgggattggggttttcccctcccatgtgctcaagactggcgctaaaagttttgagcttctcaaaagtctagagccaccgtccagggagcaggtagctgctgggctccggggacactttgcgttcgggctgggagcgtgctttccacgacggtgacacgcttccctggattgggtaagctcctgactgaacttgatgagtcctctctgagtcacgggctctcggctccgtgtattttcagctcgggaaaatcgctggggctgggggtggggcagtggggacttagcgagtttgggggtgagtgggatggaagcttggctagagggatcatcataggagttgcattgttgggagacctgggtgtagatgatggggatgttaggaccatccgaactcaaagttgaacgcctaggcagaggagtggagctttggggaaccttgagccggcctaaagcgtacttctttgcacatccacccggtgctgggcgtagggaatccctgaaataaaagatgcacaaagcattgaggtctgagacttttggatctcgaaacattgagaactcatagctgtatattttagagcccatggcatcctagtgaaaactggggctccattccgaaatgatcatttgggggtgatccggggagcccaagctgctaaggtcccacaacttccggacctttgtccttcctggagcgatctttccaggcagcccccggctccgctagatggagaaaatccaattgaaggctgtcagtcgtggaagtgagaagtgctaaaccaggggtttgcccgccaggccgaggaggaccgtcgcaatctgagaggcccggcagccctgttattgtttggctccacatttacatttctgcctcttgcagcagcatttccggtttctttttgccggagcagctcactattcacccgatgagaggggaggagagagagagaaaatgtcctttaggccggttcctcttacttggcagagggaggctgctattctccgcctgcatttctttttctggattacttagttatggcctttgcaaaggcaggggtatttgttttgatgcaaacctcaatccctccccttctttgaatggtgtgccccaccccgcgggtcgcctgcaacctaggcggacgctaccatggcgtgagacagggagggaaagaagtgtgcagaaggcaagcccggaggtattttcaagaatgagtatatctcatcttcccggaggaaaaaaaaaaagaatgggtacgtctgagaatcaaattttgaaagagtgcaatgatgggtcgtttgataatttgtcggaaaaacaatctacctgttatctagctttgggctaggccattccagttccagacgcaggctgaacgtcgtgaagcggaaggggcgggcccgcaggcgtccgtgtggtcctccgtgcagccctccggcccgagccggttcttcctggtaggaggcggaactcgaattcatttctcccgctgccccatctcttagctcgcggttgtttcattccgcagtttcttcccatgcacctgccgcgtaccggccactttgtgccgtacttacgtcatctttttcctaaatcgaggtggcatttacacacagcgccagtgcacacagcaagtgcacaggaagatgagttttggcccctaaccgctccgtgatgcctaccaagtcacagacccttttcatcgtcccagaaacgtttcatcacgtctcttcccagtcgattcccgaccccacctttattttgatctccataaccattttgcctgttggagaacttcatatagaatggaatcaggctgggcgctgtggctcacgcctgcactttgggaggccgaggcgggcggattacttgaggataggagttccagaccagcgtggccaacgtggtgaatccccgtctctactaaaaaatacaaaaattagctgggcgtggtgggtgcctgtaatcccagctattcgggagggtgaggcaggagaatcgcttgaacccgggaggcagaggttgcagtgagccaagatcgtgccactacactccagcctgggcgacaagaacgaaactccgtctcaaaaaaaaggggggaatcatacattatgtgctcatttttgtcgggcttctgtccttcaatgtactgtctgacattcgttcatgttgtatatatcagtattttgctccttttcatttagtatagtccatcgattgtatatccgtccttttgatggccttttgagttgtttcccatttgcggttatgaaataaagctgctataaacattcttgtacaattctttttgtgatcatatgttttcgtgtttcttggagaaatacttaggaggggaattgcgagtttggaagtaaaaagtagctgtattttgaactttttcagaagctctgagttttccagagcggttgtaccattttacactccaactagcaaggtatgggagttattatggttgtgccacagccttccggacattaggtattgtcagtctttctaatgtggtatatccttgtggttgtaatttacagttctctattgactaaggatgttcagcattttttcatgtgcctattggccattcgtattttgtttgtaaagtagctcttcgagtcttttacctgttattttggttttttgtttgtttttattgttcagttgtgggactgctttatacattctggatacaagtcctttatcagatccatgtgtcgtgaatgttttcttctgatctgttgcttgcctatttgtttgctttacagagtttacagtatcttaagaggagtggatttatcttttttatgttcagtatttgccttgtcctgtttaggacatctttttttttttttttaaccccagggtcatgaagatattatcttacattttcttttaggacctttatggttgtaagttttacagtaaggtccttgagccattaattaattcttaaaattaattgtttatggtgtgaggtgtaggagtcagtctctggtatctttcctgtatggaaatccagttattctgtctccacttgttgaaataggcttcctttctctactgaatgcttttaattttaattattttacagttggagtatagggctaccattttagtgctattttctttttttctttgttaatttttgagacagggactcacactgttgcccaggctagagtacaatggcacaatcaaggcttactgcagcctcgaacccctgggctcaagcagtcctctagcagcctcacgagtagctgggattactccaccacacccagctaactattttatttttttgtattgacaggatctcactatgttgcccaggctggtctcaaactgctggcctcaagctttcatcccatctcggcctcccaaagtgctgggattacaggtgtgagccaccatgcctgacctcttagtgctattttctatttatctcctctgttctctgctctctttaaacgttggaggaagaaacagtacccatcttacacaaactcttcagaaaacagaggaacagactgggcgcggtggctcatacctgtaatctcagcactttggtacgctgaggcaggggatcatttgaggtcgggagttcgagaccagcctggccaacacggcgaaaccccatctctactaaaaatacaaaaagtagctaggcgtggtgacacatacctgtaatgccagttactcaggaggctgaggcacaagaatcccttgaacctgggaagcggaggttgcagtgagccgagattgcgccactgcactccagcctgggcaacagagtgagaccctgtctcagaaaaaaaaagaaagaaagaaaaaatagaggaatatttcccaacttgttttcgaagccagcataatcctggtaccaaaaccaaacaaggacattataagaaaagaaaatatagaccaatattcctgttagcatagacatgcaacagctaaccaattttagcaaaccaaacctggtaatatagaaaaaaggataaataggccagtcgcggtggctcacgcctgtaatcccagcactttgggaggctgaggcaggcagatcacttgaggtcaggagtttgagaccagcctgaccaacatggtgaaaccccgtttctaataaaaatacaaaaatcaggctgggcacggtggctcacgcctgtaatcccagcactttgggaggccgaggtgggcagatcacgaggtcaggagttcaagaccagcctgaccaatgtggtgaaacgccatctctactaaaaatacaaaaatcagccggtgtggtggcacctgcctgtaatcccagctactcaggaggctgaggcagaattgcttgaacccgggaggcagaggttgcagtgagccaagatcgtgccactgcactccagcctgggcgacagagcaagacttcatctcaaaaaaaaaaaaaaattagctgggcatggtggtgggcacctgaaatcccagctactcgggagtctgaggcaggagaatcgcttgaacccaggaggcagaagttgcactgagctgggatcacaccattgcactccagcctgggcaacagagtgagactccatctcaaaaaaagaaaaagaaaaaggataaatacattctaaccaaataatgtttatctcatgattgtagctgattcaacattcaaaaattggcctggtgcagtagctcaggcctgtaatcccaacattttaggaggctgaggcaggaagatctcttgagcccaggatttcaagaccagcctgggcaacatagtcagactggtctttactggggggaaaaaaatcagtctgtgtaattcaccacattaacaaagggaaacataaaaaccctatgatcatttcaacagatgtagcaaaagcagttaatgatattcaacacatatgcatgattacaaaccaaccaacctcctagcaaactagggaaaggaaacttaacctagtttgataacagggcgtccacagtcggagttccactagcagcatacataatggtagaaaactcagtgctgccgggcgcggtggctcacgcctgtaatgccagcactttgggaggcctaggcgggcggatcacgaggtcaggagatcgagactgtcctgactagcatgctgaaaccccgtctctactaaaaatacaaaaacaaaaaattagccgggcatggtggcgggcgcctatagtcccagctactcgggaggctgaggcgagagaatggcgtgaacccgggaggcggagcttgcagagcctagatcgtgccactgcactccagcctgggtgacagagtgagacttcgtctcaaaaaaaaaaaaaaaaaaaaaagaaaagaaaactcaacgctttttcctctaagatcaggaactagaaaaggatttgactctcacaacgttgataccatactggaggttttaaccaggcaagaaaaagaaataatgagggccgggtgcggtggctcaggcctgtaatcccagcactttgggaagccgagacgggtggatcacgaggtcaggagatcgagaccatcctggctaacacggtgaaaccctgtctctactaaatatacaaaaaattagccgggcgtagtggcgggcgcctgtagtcccagctactcgggaggctgaggcaggagaatggcgtgaactcagggggcggagcttgcagtgagctgagatcgagccactgcactccagcctgggcgacagagcaagactgtgtctcaaaaaaaaaaaaagaaaaagaaataatgattagtggcccgatgtctcacgcctataatcccagcactttgggaggccgaggtgggcagatcacctgaggtctggagttggagaccagcctgacaaagatggtgaaacctcgtctctattaaaatattaaaaaaatagccaggcgttggccgggtacagtggctcatgcctgtaatcccagcactttgggaggccgaggtgggtggatcacctgaggtcaggagttcaacaccagcctggccaacatggtgaaaccccatctctactaaaaatacaaaaattagccgggcgtagtggcgggcgcctgtaatcccagctacttgggaggcttaggcaggagaatcgcttgaacctgggaggcggaggttgtagtgagccgagattgcaccattgcactccagcctgggtgacaaaagcaaaaactccgtctcaaaaaaaaaagaattagccaggggtagtggtgaacgcctgtagtcccagctactcaggaggcagaggcaggagaatcacttgaacccaggaggcagaggttgcagtgagccgagattgtcccattgcactccagcctaggcgacaagagcaaaattccatgtcaaaaaaaaaaaaaaaaaaggaaagaaaaaaaataacgattagaaaggaagaaataaaacacattcacagccagtatgattctatacatacatgtcctaatggggccaggcgtggtggctcatgcctgtaatcctagcacttttaggaggctgaggcaggtggcttccctgggaccagcctggccaacatggtgaaaccccaactctaataaaaatacaaaaaatcagccaggcgtggtgacgggcacctctaatcccagctactcaggaggctgaggcaggagaattgcttggacctgggaggcagaggttgcagtgagccgagatcgcgctattgcactccagcctgggcaacaagagtgaaactccggcagggtgtggtggcttacgcctgtaatcccagcacttcgggaggctgaggcaggccgatcacctgaggtcaggagtttgagaccaacctaacatggtgaaaccccgtctctactaaaaatacaagaattagctgggtgtagtggtgggcgcctgtaatcccagctacttgggaggctgagacagaagaattgcttgaacccaggaggtggaggttgcagtgagctgagatcatgccattgcacaccacgccgggcaacagagcgagattccgtctcaaaaaaaaaaaaaaagagtgaaactctatctcaaaaaaaaaaaaaagtcctaatggaaaatccataaaaagctaccaaaactaataaataaatatagcagggttgcaggttacagggcaatatagttatccctctatctgtaggggcttggttctgggactcctcacacaccaaacccacagatgtctaagtcccatatataagacggtatagtatttggatttaacctacacatatcctcccatatagtttaaattatctctagattacttacattacccccatacaatgaaaatgctaatgtacatgcaagtatgtatgtaagtacttgtactatattgtttagggaatcactggacatataggccttcaagactgataccagcagccactgttaagattctggtcaggcctgcccctgtttggggtctcagttgatctcattgccttcccacccagccaagggcacctgcatttctcttggctccctggccatttggaaggcctagttcagcctggcacatttgtatcctggcccactgatgctggtacccctgggaaggtcctgctctgaaaaacacggagattttagttgctactgaagatttgagagataaagacagggagacctgtctgtagacctgtgtccctccaagtgggattgagactttgggccccccatttcaggacagcacctcctggcctgttgactgaatagatccctgaaggaggtgtacttgcattaatggagtgggggtgggagcagtaccacagatccgcactaacaatcacacagttctctctagaataataatatagaacaagtgaaatagaacaattgcagaaagagctaacctttgttgagctcttactgtgtgcccagcactttcctcaactctacatttcccataatacacagagtactaggtaggccaggcttggtggctcacgcctgtaatcccagcactttaggaggccaaggggggtggatcacctgaggtcgggagttcaagaccagcctgaccaacatggtgaaaccccgtctctactagaagtacaaaattagccaggtgtggtggcacatgcttgtagtcctagctactcagcaggctgaggcaggagaatcatttgaatccgggaggaggttgcagtaagcggagatagtgccactgtactccagcctgggcaataagagctgagactccgtctcaaaataaaataaaataaaataaaataaaataaaataaaataaaaaaagaaaagagcctgccattaaaggagctgtttggtaggggatgttttgtcagtgcaaacaacagaaaagtgggctgggcacagtggttcatgcctgtaatcccagcactttgggaggccaaggcgggcggatcacctgaagttgggagttcaagaccagcctgaccaatatggagaaaccccgtctctactaaaaatacaaaattagccgggcgcagtggcgcatgcctgtaatcccagctactcgggaggctgaggcaggagaatcgcttgaacctgggaggcagaggttgcggtgagccgagatcgcaccattgcactccagcctggacgagagcaaaactctgtctcaaaaaaaaaaaaaaacagaaaagtgtaacaaacacttacagtaggcatgtttcttagcaaatctgatgacaaatttggcataaagaaagagagcatccctgaaaaaaaaaaaaagaaaaagaaagagagcatcctgcctgggcaacatagtgaaaccctgcctctacaaaaaaactcaaaaattggccgggtgcagtggctcacacctgtaatcccagcactttgggagtcggaggcgggaggatcacctgaggtcaggagttcgaaaccagcctggccaacatggcaaaaccccatctctactaaaaatacaaaaaattaatcaggcgcattggtgggcgcctgtaatcccagctactcaggaagttgaggcaagaggatcgcttgaatctgggaggtggaggttacagtgagtcgagatcacaccactgcactctagcctgggtgacagggcgagactccgtctccaaaaaaaaaaagaaaaagaaaaagactaaaaaattagccaggcaggcctctgtggtcccagctacttgggaggctgaggcaggagaatcactgagcccaggagtccgaggctgtagtgagccatgattgcaccactgtaccctagcttgggcaacaaagcaagaccctgcctcaaaagaaaaaagaaagaaagaaagaacatggcgggccaggcacagtggctcacacctgtaatcccagcgctttgagaggccgaggcaggtggatcacaaggtcaggagttccacaccagcctggccaacatggtgaaaccctgtctctactaaaaatacaaaaaatcagccaggcatggtggcaggggcctgtaatcccagctactcgggaggctgaggcaggagaattgcttgaaaccagaaggcagaggttgcagtgagcctagactgcaccactgcactccagcctgggcgaaaagagccaaactccatctcaaaaaacaaacaaaaaaacaaaacaaaagaaaacatggcaaagcctttgaaagcttgtctgggagaaggtgcgatgatagttgcataacttcgtgcaagatgctggtccacacaggggctgccccttgctctttctcgctctcttaacctctcatataacaggcttgtgtgttattcacatttattgagcccaagcaggtgcaaggcattgtgatctaatactttggtcagcaagacaacaagatagatcactgccctgcccttaggaagtgtatatgctattagaggaaacagataaaataaacaaggaaaagtatcagacaatgtaagtgctatgagaatgcaaatgaggtgatgtgaattaaaataggatgacttaaagtctgcacgggaaggagcctacccccatgttcctggctagccaaggaaccaccagttgattagcagagaagggcagccagtctagctagagcttttggggaagagggagtggttgttaagagatgagattaaagaagccgagacgggccattcgtgaggggtttgtaatgcagggctgaggagtgtccgaagagaatgggcaggtgagcggtgagacagttgttcttccagaagctttgcagtgaaaggaatcaaagaaatggagccgtgtatcaggtggggaagggtgggggccaagggggtgtccttccccatacagagattgcaggctgagaatgactatatccttgttaacaggaggtgggagcagggcacggtagctcacacctgtaatcttggcactttaggaggctgaggcgggccgatcacctgaagtaaggagttcgagaccagcctggccaacatgcaaagccctgtctctactaaaaatacaaaaattagctgggtgtggtggtactcgcctgtaatcccagctactcgggagactgaggcaggagaatggcttgaacccggaaggtagaggttgcagtgagctgagatcatgccactgtgctccagcctaggtgacagagagagactccatctcaaaaaaaaaaaaaaaatacaggaagggagttgggaatagggtgcacatttaggaagtcttggggatttagtggtgggaaggttggaagtccctctctgattgtcttttcctcaaagaagtgcatggctggtgaggggtggggcaggagtgcttgggttgtggtgaaacattggaagagagaatgtgaagcagccattcttttcctgctccacaggaagccgagctgtctcagacactggcatggtgttgggggagggggttccttctctgcaggcccaggtgacccagggttggaagtgtctcatgctggatccccacttttcctcttgcagcagccagactgccttccgggtcactgccatggaggagccgcagtcagatcctagcgtcgagccccctctgagtcaggaaacattttcagacctatggaaactgtgagtggatccattggaagggcaggcccaccacccccaccccaaccccagccccctagcagagacctgtgggaagcgaaaattccatgggactgactttctgctcttgtctttcagacttcctgaaaacaacgttctggtaaggacaagggttgggctggggacctggagggctggggacctggagggctggggggctggggggctgaggacctggtcctctgactgctcttttcacccatctacagtcccccttgccgtcccaagcaatggatgatttgatgctgtccccggacgatattgaacaatggttcactgaagacccaggtccagatgaagctcccagaatgccagaggctgctccccccgtggcccctgcaccagcagctcctacaccggcggcccctgcaccagccccctcctggcccctgtcatcttctgtcccttcccagaaaacctaccagggcagctacggtttccgtctgggcttcttgcattctgggacagccaagtctgtgacttgcacggtcagttgccctgaggggctggcttccatgagacttcaatgcctggccgtatccccctgcatttcttttgtttggaactttgggattcctcttcaccctttggcttcctgtcagtgtttttttatagtttacccacttaatgtgtgatctctgactcctgtcccaaagttgaatattccccccttgaatttgggcttttatccatcccatcacaccctcagcatctctcctggggatgcagaacttttctttttcttcatccacgtgtattccttggcttttgaaaataagctcctgaccaggcttggtggctcacacctgcaatcccagcactctcaaagaggccaaggcaggcagatcacctgagcccaggagttcaagaccagcctgggtaacatgatgaaacctcgtctctacaaaaaaatacaaaaaattagccaggcatggtggtgcacacctatagtcccagccacttaggaggctgaggtgggaagatcacttgaggccaggagatggaggctgcagtgagctgtgatcacaccactgtgctccagcctgagtgacagagcaagaccctatctcaaaaaaaaaaaaaaaaaagaaaagctcctgaggtgtagacgccaactctctctagctcgctagtgggttgcaggaggtgcttacgcatgtttgtttctttgctgccgtcttccagttgctttatctgttcacttgtgccctgactttcaactctgtctccttcctcttcctacagtactcccctgccctcaacaagatgttttgccaactggccaagacctgccctgtgcagctgtgggttgattccacacccccgcccggcacccgcgtccgcgccatggccatctacaagcagtcacagcacatgacggaggttgtgaggcgctgcccccaccatgagcgctgctcagatagcgatggtgagcagctggggctggagagacgacagggctggttgcccagggtccccaggcctctgattcctcactgattgctcttaggtctggcccctcctcagcatcttatccgagtggaaggaaatttgcgtgtggagtatttggatgacagaaacacttttcgacatagtgtggtggtgccctatgagccgcctgaggtctggtttgcaactggggtctctgggaggaggggttaagggtggttgtcagtggccctccaggtgagcagtaggggggctttctcctgctgcttatttgacctccctataaccccatgagatgtgcaaagtaaatgggtttaactattgcacagttgaaaaaactgaagcttacagaggctaagggcctcccctgcttggctgggcgcagtggctcatgcctgtaatcccagcactttgggaggccaaggcaggcggatcacgaggttgggagatcgagaccatcctggctaacggtgaaaccccgtctctactgaaaaatacaaaaaaaaattagccgggcgtggtgctgggcacctgtagtcccagctactcgggaggctgaggaaggagaatggcgtgaacctgggcggtggagcttgcagtgagctgagatcacgccactgcactccagcctgggcgacagagcgagattccatctcaaaaaaaaaaaaaaaaggcctcccctgcttgccacaggtctccccaaggcgcactggcctcatcttgggcctgtgttatctcctaggttggctctgactgtaccaccatccactacaactacatgtgtaacagttcctgcatgggcggcatgaaccggaggcccatcctcaccatcatcacactggaagactccaggtcaggagccacttgccaccctgcacactggcctgctgtgccccagcctctgcttgcctctgacccctgggcccacctcttaccgatttcttccatactactacccatccacctctcatcacatccccggcggggaatctccttactgctcccactcagttttcttttctctggctttgggacctcttaacctgtggcttctcctccacctacctggagctggagcttaggctccagaaaggacaagggtggttgggagtagatggagcctggttttttaaatgggacaggtaggacctgatttccttactgcctcttgcttctcttttcctatcctgagtagtggtaatctactgggacggaacagctttgaggtgcgtgtttgtgcctgtcctgggagagaccggcgcacagaggaagagaatctccgcaagaaaggggagcctcaccacgagctgcccccagggagcactaagcgaggtaagcaagcaggacaagaagcggtggaggagaccaagggtgcagttatgcctcagattcacttttatcacctttccttgcctctttcctagcactgcccaacaacaccagctcctctccccagccaaagaagaaaccactggatggagaatatttcacccttcaggtactaagtcttgggacctcttatcaagtggaaagtttccagtctaacactcaaaatgccgttttcttcttgactgttttacctgcaattggggcatttgccatcagggggcagtgatgcctcaaagacaatggctcctggttgtagctaactaacttcagaacaccaacttataccataatatatattttaaaggaccagaccagctttcaaaaagaaaattgttaaagagagcatgaaaatggttctatgactttgcctgatacagatgctacttgacttacgatggtgttacttcctgataaactcgtcgtaagttgaaaatattgtaagttgaaaatggatttaatacacctaatctaaggaacatcatagcttagcctagcctgctttttttttttttttttttggagacagagtctcactctgtcacccaggctggagtgcagtggcgggatctcggctcactgcaacctccgccttctgggttcaagcgattctcctgcctcagcccactgagtagctgggattacaggcacctgccccgacgcccagctaattttttgttatttatttatttttttttttagtagagatgaggtttcaccatgttggccaggctagtctcgaactcctgaccttgtgatctgcctgccttggcctcccaaagtgctgggattacaggcgtgagccaccgcacccggcctgcctagcctacttttattttatttttaatggagacagcatcttgctctgttgcccaggctggattacagtgatgtgatcatagctcattataccctcctgggctcaagcaatccccctaactctgcctccccagtagctaggaccacaggcatacaccaccatacccagctaatttttaaaattttttgtagatagatagagtctcactatgttgcccaggctggtctctagcctacttttttgagacaaggtcttgctctgtcacccaggctggatagagtgcagtagtgcagtcacagctcactgcagcctccacctcccaggctccatccatcctcccagctcagcctcccaagttgcttcaactacaggcctgcaccaccatgcctggctaatttttatttatttatttttattttattttattttatttttttgagactcagtctcactctgtcgcccaggctggagtgcagtggcatgatctcggctcactgcaacctctgcctcctgggttcaagtgattctcctgcctcagcctcccgaatagctaggactacaagcgcctgctaccacgcccagctaatttttgtatttttagtagagacagggtttcaccatgttggccaggctggtctcgaacttctgaccatgtgatccgcccgcctcggcctcccaaagtgctgggattacaggtgtgagccaccacgcccggctaatttttatttatttatttaaagacagagtctcactctgtcactcaggctagagtgcagtggcaccatctcagctcactgcagccttgacctccctgggctccggtgatttcaccctcccaagtagctaggactacaggcacatgccacgacacccagctaattttttattttctgtgaagtcaaggtcttgctacgttgcccatgctggtatcaaacccctgggctcaatcaatccttccacctcagcctccccaagtattggggttacaggcatgagctaccacactcagccctagcctacttgaaacgtgttcagagcatttaagttaccctacagttgggcaaagtcatctaacacaaagccctttttatagtaataaaatgttgtatatctcatgtgatttattgaatattgttactgaaagtgagaaacagcatggttgcatgaaaggaggcacagtcgagccaggcacagcctgggcgcagagcgagactcaaaaaaagaaaaggccaggcgcactggctcacgcctgtaatcccagcatttcgggaggctgaggcgggtggatcacctgaggtcaggagttcaagaccagcctagccaacatggtgaaaccccgtctctactaaaatacaaaaattaaccgggcgtgatggcaggtgcctgtaatcccagctacttgggaggctgaggcaggagaatcgcttgaaccaggaggcggaggttgcagggagccaagatggcgccactgcactccagcctgggcgatagagtgagactccgtctcagaaaaaaaagaaaagaaacgaggcacagtcgcatgcacatgtagtcccagttacttgagaggctaaggcaggaggatctcttgagcccaagagtttgagtccagcctgaacaacatagcaagacatcatctctaaaatttaaaaaagggccgggcacagtggctcacacctgtaatcccagcactttgggaggtggaggtgggtagatcacctgacgtcaggagttggaaaccagcctggctaacatggtgaagccccatctctactaaaaacacaaaaattagccaggtgtggtagcacacgcctgtagtcccagctactcgggaggctgaggcacaagaatcacttgaaccccagaggcggagattgcaatcagccaagattgcaccattgcactcccgcctgggcaacagagtgagaccccatctcaaaataaataaataaatatttttaaaagtcagctgtataggtacttgaagtgcagtttctactaaatgcatgttgcttttgtaccgtcataaagtcaaacaattgtaacttgaaccatcttttaactcaggtactgtgtatatacttacttctccccctcctctgttgctgcagatccgtgggcgtgagcgcttcgagatgttccgagagctgaatgaggccttggaactcaaggatgcccaggctgggaaggagccaggggggagcagggctcactccaggtgagtgacctcagccccttcctggccctactcccctgccttcctaggttggaaagccataggattccattctcatcctgccttcatggtcaaaggcagctgaccccatctcattgggtcccagccctgcacagacatttttttagtcttcctccggttgaatcctataaccacattcttgcctcagtgtatccacagaacatccaaacccagggacgagtgtggatacttctttgccattctccgcaactcccagcccagagctggagggtctcaaggaggggcctaataattgtgtaatactgaatacagccagagtttcaggtcatatactcagccctgccatgcaccggcaggtcctaggtgacccccgtcaaactcagtttccttatatataaaatggggtaagggggccgggcgcagtggctcacgaatcccacactctgggaggccaaggcgagtggatcacctgaggtcgggagtttgagcccagcctgaccaacatggagaaaccccatctctactaaaaatacaaaagtagccgggcgtggtgatgcatgcctgtaatcccagctacctactcgggaggctgaggcaggagaatcgcttgaacccgggaggcagaggttgcggtgagctgagatctcaccattacactccagcctgggcaacaagagtgaaactccgtctcaaaaaagataaataaagtaaaatggggtaagggaagattacgagactaatacacactaatactctgaggtgctcagtaaacatatttgcatggggtgtggccaccatcttgatttgaattcccgttgtcccagccttaggcccttcaaagcattggtcagggaaaaggggcacagaccctctcactcatgtgatgtcatctctcctccctgcttctgtctcctacagccacctgaagtccaaaaagggtcagtctacctcccgccataaaaaactcatgttcaagacagaagggcctgactcagactgacattctccacttcttgttccccactgacagcctcccacccccatctctccctcccctgccattttgggttttgggtctttgaacccttgcttgcaataggtgtgcgtcagaagcacccaggacttccatttgctttgtcccggggctccactgaacaagttggcctgcactggtgttttgttgtggggaggaggatggggagtaggacataccagcttagattttaaggtttttactgtgagggatgtttgggagatgtaagaaatgttcttgcagttaagggttagtttacaatcagccacattctaggtaggggcccacttcaccgtactaaccagggaagctgtccctcactgttgaattttctctaacttcaaggcccatatctgtgaaatgctggcatttgcacctacctcacagagtgcattgtgagggttaatgaaataatgtacatctggccttgaaaccaccttttattacatggggtctagaacttgacccccttgagggtgcttgttccctctccctgttggtcggtgggttggtagtttctacagttgggcagctggttaggtagagggagttgtcaagtctctgctggcccagccaaaccctgtctgacaacctcttggtgaaccttagtacctaaaaggaaatctcaccccatcccacaccctggaggatttcatctcttgtatatgatgatctggatccaccaagacttgttttatgctcagggtcaatttcttttttcttttttttttttttttttctttttctttgagactgggtctcgctttgttgcccaggctggagtggagtggcgtgatcttggcttactgcagcctttgcctccccggctcgagcagtcctgcctcagcctccggagtagctgggaccacaggttcatgccaccatggccagccaacttttgcatgttttgtagagatggggtctcacagtgttgcccaggctggtctcaaactcctgggctcaggcgatccacctgtctcagcctcccagagtgctgggattacaattgtgagccaccacgtccagctggaagggtcaacatcttttacattctgcaagcacatctgcattttcaccccacccttcccctccttctccctttttatatcccatttttatatcgatctcttattttacaataaaactttgctgccacctgtgtgtctgaggggtgaacgccagtgcaggctactggggtcagcaggtgcaggggtgagtgaggaggtgctgggaagcagccacctgagtctgcaatgagtgtgggctggggggcccagtgcccgggttccgggaggggaacaaaggctggagactgggtcagtctgcgggctgcatgacaacaagggagggggtggctccattcataactcaggaaccaaccgtccctcctcccctccggccacggctggcacaaggttctctccctcccctgcttctaggactgggctgcttccccctcggcagcctctcaccaaggattacgggatttaaatgtctgatttagcaaggctgagcctccagggtggccatctgctccatcagaaagtggcaggatacctgggttcccaaggggaacaggggtgggtgctactggatggagagaggccagtgggaggcctgctagccagggtcccaggaaagtgggggcagctaaggtaagagtaggggtgtggggctaggtccttcccagcatcccctcatcctgggcctcatgccaggtagctgaatgaattgaagctttaaactctgccaggaaaacctttcaaagggcttcttgggatagggaggagagtcgggttgaggagctcagtactgcctgcccatgctcctcagggctgctggctcccagggaggggggctgggagcaggcaggctcttccccatcacccactgctctcttggagccagtgcttgaaggggcagtcagacatggcttgcccttcctcctccctggtggtggagatgggtgttagggtccagtgggtgctactgtccaggggggcttctggggccaccagcctgtcagctcatcaaccaggctgaaggtgcaagcaggagccccttgccttgccccaaggatcccagacagctatgaagccaccagccttcctgacctcaagaccaccttttttttttctctttcttactagggaatgccaaacactctccccaggagatccagacccgcctctttcagagacttttaacttaaacatctgtccctacccagcaggcaaactagagctcctgaagctcagtccctgtccttgcctctgtagacaggtcaccttgatgagcttcctttttttttttttaatttttttttattttaggctttattggggcataattgatcccccaaaattgcatacattcaaggtatgcagtgtgatgatttgatatgggggtatattgtgaaaccattaccacaatcaaattaatcagcacgtccatcatcacacacagttaccatttgtgtgtgtgcacgtgtgttcacctacgacgaggacacttggacctactctgcagatctcaagtaaacagaaaatctccctttttgacaaccatcctccaccctttcaatcccaaccttttcctagattatgtccctagctctgtttttatttctgctgtgctgcttcagatccattctgactctgccaaacccttctttgtgagctgatagattgctggattgagaattacagctgggcgcggtggctcacgcctgtaatcccaacactgtgggaggccaaggccggcggatcacttgaggtcaggagttggagaccagcctgaccaacaagatgaaaccccatctctactaaaaatacaaaattagctgggcatggtggtgcacgcctgtaatctcatcttcttgggaggctgaggcaggagaattgcttgaacccgggaggtggaggttgcagtgagccaagatcctgccattgcactccagcctgggcaacaacagtgaagctccatctcaaaacacacaaaaaaaagaagtacaaagtctgagacttcaggccagctctgctacactatatactctaacctctctggtcctacttggtgacttctttccctctggtcgtgttcaagttcccgtcccatccagtcaagcaggtactcattggtaccttaccctgtgccaggagctgttctaggccctggaaacctatggcagacatgttccctaccctcccactcaaagagcccaggccttatcctaatgagatctgaaatcaaatctcccaatttcctcatggcttcagtctaaacttgtaattcacaaccttaaatcaatatgttctatttttttatttagaaaacatttccggccaggcacggtggatcacacctgtaatcccagctactcgggaggctgaggcaggagaatcgcttgaacccaggaggcagagggttgcagtgagccgagattgcgccattgcactctagcctgggcaacagagcaagactccatctcaaaaaagaaaaaaaaatggaagaaaaaaaaatttccccctcattttaggaacacgaggtctccaaatctaaaattcgtactctgaggagattgaatagccttaaatgctttcatcattaaaaagaaaagaaaggaacctggtatgcatcctaaaaatgaaaaatatacctacctgtaatcccagcacacagcacattgggaggctaaagcaggaggataacttgaggccaggagtttcagatcagcctgggcaacatagcaacaccccatttctttttcttttcttttttttttggagacacagtctcgctctgttactcaggctggagtgcagtggctcaatctcagctcactgcaagctctgcctcccaggttcatgccattctcctgcctcagcctcccgagtagctgggactacaggcgcccgccaccacgcctggctaattttttgtatttttagtagagacagggtttcaccgtgttagccaggatggtctcgatctcctgacctcgtgatccgccagccttggcctcctaaagtactgggattacaggcgtgagccactgcgcctggccacaacaccccatttctattttaataaaataaaatactgtgaaaaacatttacaatttttaaattttaattttaaaattaaacttatatttattcatttgtgtgtgtgggtttttttttttttttttttttgctttttttttgagatggagtgtcactctgtcacccaggctggagtgcagtggcgtgatctctgcctcccggttcaagtgattctcctgccatagcctcccaagtagctgggactacaggtacacgccaccacgccgggttaatttttgtatttttagtagagacaggatttcactgtgtcgccaggctagcctcgaactcctgacctcaggtgattcgcccaccttggcctcccaaagtgctgtgattacaagcgtgagccaccgtgcccagcccaaagttggttttaatagcagaaaatctatcaacataattcaatatattaaatttagaaagaaaaattatctatcatatcaacagatactgaaaggaatttgattaaatttcagtagccatttccttaaaaaagaaaacactttaacacagtaatagactgataatggaataccaattttcctaataagttaaacattaagataatttcaattaaggtcaagagctgggccaggtgcagtggctcacacctgtaatcccaacactttggaggccaaggtgggtggatcacctgaggtcaggagtggagaccagcctggctgacaatagtgaaatcctgcctctactaaaaacacaaaaaattagctgggcatggtggtgggcacctataatcccagctactgggaaggctgagacaggagaattgcttgaacctgggaggcggaggttgcagtgagcaaagatcacaccattgcactccagcctgggcgacagagccagagtcagtctcaaaaaaaaaaagaggtggccacacctataatccaaacattttgtgaggccaaggcaggagaattgcttcaggccaagagttgaacacctcgtcaacatagccagacctctctctagatagatagatagatgatagatagagagatagatagatgatagatagagagatagatagatgatagatagatagatagatagatagatagatagatagatagatagatagatagatagataatctggccgggtgtggaggctcacgcctgtaatcccagcactttgggaggctgaggcgggcagatcacgaggacaagagattgaaaccatcctggctaacaaggtgaaaccccgtctctactaaaaatacaaaaaattaggcgggtgtggtggcacgcgcctgtagtcctagctattcaggaggctgagacaggagaattgcttgaatccgaaaggcggaggttgcagcgagccgagatcgtgccactgcactccagcctgggtgacagagcaagactccatctcaaaataaataaataaataatcaagaacagtataaggggctgtatggtggctcatgcctgtgatcccagcactttgggaggccaaggtgggaggatcccttgagaccagcccaggcaacagagaaagaccctgtctctatttaaaaaaattaaaaactggccgggcacggtggctcacgcctgtaattccagcgcttgggaggccaaggcaggcacatcaggaggtcaggagttcgagaccagcctggccaacgtggtgaaaccccgtctctactaaaaatacaaaaagtagctaggcgtggtggcaggcacctgtaatcccagctacttgggaggctgaggcaggagaatcgcttgaacccaggaggcggaggttgcagtgggcaaagatcgtgccattgcactcagcctgggtgacagggcaagactccatctcaaaataaataaacaaagtaattaattaattaaattaaaaactgtggggatatagacttactctggttttattttttcttttcttttcttttcttttttctgagacggagtctcgctctgttgcccaggctggagtacagtggcgtggtttctgttctctgcaacctccacctcccggattcaagcgattctcttgcctcagcctcttgaatacctggaattacaggtgcctgccaccacccccggctaattttttgtatttttagtagagacagggtttcaccatgttggccaagctggtctcgaactcctgacctcatgatccacccgcctctgcctcccaaagcactgagactacaggagtgagccactgtgcccagcctactctggttttagtgcattcaagaggaacaaaaaaggaagaaaatcactagtaaatatacctctttctggttagagtggatgtttggaaattatatatatattatattatattatatatattatatatatacacaaacacgtacatacatgcacacacatatatgcctttttgattataggatagtataccaaaactcagaaatattatggaattaacagaatttagtaaggcagataagtagtaggtagaaaaatattaattttatcttccagcagaagcactgtgaaaaattagacaacaagaaaacattccattcaaaataatgacaataaggccgggcatggtggctcacacctgtaatcccagcactttgggaggctgaggcaggaggatcatctgaggtcaagtttgagatcagcctggccaacatggtgacaccctgtctctactgaaaatacaaaaatcagccagctatggtagtgtaagcctgtaattccagctactcgggaggtcgaagcagaagaatcacttgaacccaggaggcagagattgcagtgagccaagatcctgccagtgctttccagcctgggcaacagtgtgaggctccatctcaaaaaaaaaaaaaaaaaaaagacaatagcaataaacattaagaaatgtgtaataggaatggcacacacaaagaaggaatggcacagagcctgtatgcagaagaccacaaacccttatttaacgacgtaagccaagatccaaagaaaatgatagattctcagatgggaaaactaaaaaaataagaaaaatcaattatctcgagataaatataatataatgcaatttcaattagaatcccaaattttcattgtgtgtgtgtgtgagttgggtaaatttatcataaatgtataggaacgagtaagtgtcactagttgtttaaataaatactggatttgggccaggcatggtggctcacgcctctaatcccagcactttgggagaccgaggcgggcagatcatgaggtcaggagatcgagaccatctggccaacatagtgaaaactcgtctctactaaagatacaaaaaattagctgggcatggtggcacgtgcctgtagttccagctactctggaggctgaggcaggagagttgcttgaacccgggaggtggaggttgcaatgagccgagatcctgtcactgcactccaccctggcgacaaagtgagactccgtctctctctctctctttaggccaaggcaggtggatcacctgaggtcaggagttcaagacagcctggccaacatagcgaaatcccatctctactaaaaatacaaaaattagcctggcagtggtggcccacgcctgtaatcccagctactaagggggctgaggcaggaggatctcttaaccagggaggaggaggttgcagtgagcagagattgtgccactgcactccagcctgtgcaacagagtgagactctgtctcaaaaaaaataaataaacaaaatactggaggccgggcacggtggctcccgcctgtaatcccagcactttgggaggccaaggcgggtgaatcgctttcagctcaggagttccggaccagtctgggcaacatggcaaaaccccgtctatactaaaaatacaaaacttagccaggcgtggtagtgcatacctataatcccagctactcgagaggctgaggcaggagaatcccttgaaaccgggaggcagaggttgcagtaagctgaaatcgtgccactgcactccagcctggacgacacagcgggagactgtctcaataaataaaataaataatataaaataacataaataataaaattgtaaataataagtaaataataagcaacagaatggagagggggtcctatttgccttgccagattttagagaacttagtataggctaggcaggtgcagtggctcacgcctgtaatcccagcactttgggagtccaaggcagtggatcacatgaggtcaggagttcaagaccagcctgaccaacatggtgaaaccccatctctactaaaaatacaaaattagccaggcatggtggcacatgcctgtaatcccagctacttgggaggctgaggcaggagaatcacttgaactcgagaggtggaagctgcagcgagctgagatcacgctactgtactccagcctgggcaacaagagtgagactccatcaaaaaaaaaaaaaaagaaacgagaaaaaaaaaaagaaaacttactatataactgctggaatgaggtggatgtgacatatggagtggtagacaaaccaaggaaagcaagtaacaaatacaggagatgttctcatacaggagaattattacatggccaaaattagcatttcaatttaattggaacacattagatatatttgttcttttgttctttttgttatctttttttttttttttttttttttttttttgagacagagtttcgctctcattgcccaggctggagtgtaatggtgtgatcttgactcaccgcaacctccgcttcctacgttgaagtgattctcctgcctcagcctcccgagtagccgggattacaggcatacgccaccacacctggctaattttttttgcattttcagtagagacagggtttctccatgttgatcaggctggtttcgaactcctgagcttaggtgatccgcccacctcagcctcccaaagtgctgggattacaggcgtgagccactgtgcccggcccctatctctttttttgtttgtttgttttctgagatggaatctggctctctcacccaggctagagtgcaatggcacgatgttggctcactgcaacatccacgtcccgggttcaagcgattcttctgcctcagcctcccaagtagctgggattacaggtgcctgtcgccacatccagctaattttttgtatttttagtagagacagggtttcaccgtgttccccaggctggtctcaaactcctgagctccggcaatccacccgcctcggcttcccaaagcgctaggattacaggcgtgagccaccgcacctggcccctatctcttaaaaatatatttttttgcccaacacacatttccaagttgccttgggggaaaaaaaataaatgaagctggcacaactgaaaaaataaaactggggccttggccaggcacagtggctcaggcctataatcccagcactttgggaagctgaggtgggaggatcacttgaggtcaggagttcgagaccagtctggctaacacggtgaaaacccttctctactaaaaatacaaaagtcagccaggcgtagtggtgtgcacctgtaatcccagctactcaggtagctgaggcatgagaatcacatgaacctggaaagtggaggttgcagtgagccgagattgcaccactgcactccagcctgggtaaggaaatgagactctgtctccaaaaaaaaaaaaaagatactacaaagtcaagagacaaacaat

SEQ ID NO: 2 - DNA, 2591 bp, Homo sapiens
gatgggattggggttttcccctcccatgtgctcaagactggcgctaaaagttttgagcttctcaaaagtctagagccaccgtccagggagcaggtagctgctgggctccggggacactttgcgttcgggctgggagcgtgctttccacgacggtgacacgcttccctggattggcagccagactgccttccgggtcactgccatggaggagccgcagtcagatcctagcgtcgagccccctctgagtcaggaaacattttcagacctatggaaactacttcctgaaaacaacgttctgtcccccttgccgtcccaagcaatggatgatttgatgctgtccccggacgatattgaacaatggttcactgaagacccaggtccagatgaagctcccagaatgccagaggctgctccccccgtggcccctgcaccagcagctcctacaccggcggcccctgcaccagccccctcctggcccctgtcatcttctgtcccttcccagaaaacctaccagggcagctacggtttccgtctgggcttcttgcattctgggacagccaagtctgtgacttgcacgtactcccctgccctcaacaagatgttttgccaactggccaagacctgccctgtgcagctgtgggttgattccacacccccgcccggcacccgcgtccgcgccatggccatctacaagcagtcacagcacatgacggaggttgtgaggcgctgcccccaccatgagcgctgctcagatagcgatggtctggcccctcctcagcatcttatccgagtggaaggaaatttgcgtgtggagtatttggatgacagaaacacttttcgacatagtgtggtggtgccctatgagccgcctgaggttggctctgactgtaccaccatccactacaactacatgtgtaacagttcctgcatgggcggcatgaaccggaggcccatcctcaccatcatcacactggaagactccagtggtaatctactgggacggaacagctttgaggtgcgtgtttgtgcctgtcctgggagagaccggcgcacagaggaagagaatctccgcaagaaaggggagcctcaccacgagctgcccccagggagcactaagcgagcactgcccaacaacaccagctcctctccccagccaaagaagaaaccactggatggagaatatttcacccttcagatccgtgggcgtgagcgcttcgagatgttccgagagctgaatgaggccttggaactcaaggatgcccaggctgggaaggagccaggggggagcagggctcactccagccacctgaagtccaaaaagggtcagtctacctcccgccataaaaaactcatgttcaagacagaagggcctgactcagactgacattctccacttcttgttccccactgacagcctcccacccccatctctccctcccctgccattttgggttttgggtctttgaacccttgcttgcaataggtgtgcgtcagaagcacccaggacttccatttgctttgtcccggggctccactgaacaagttggcctgcactggtgttttgttgtggggaggaggatggggagtaggacataccagcttagattttaaggtttttactgtgagggatgtttgggagatgtaagaaatgttcttgcagttaagggttagtttacaatcagccacattctaggtaggggcccacttcaccgtactaaccagggaagctgtccctcactgttgaattttctctaacttcaaggcccatatctgtgaaatgctggcatttgcacctacctcacagagtgcattgtgagggttaatgaaataatgtacatctggccttgaaaccaccttttattacatggggtctagaacttgacccccttgagggtgcttgttccctctccctgttggtcggtgggttggtagtttctacagttgggcagctggttaggtagagggagttgtcaagtctctgctggcccagccaaaccctgtctgacaacctcttggtgaaccttagtacctaaaaggaaatctcaccccatcccacaccctggaggatttcatctcttgtatatgatgatctggatccaccaagacttgttttatgctcagggtcaatttcttttttcttttttttttttttttttctttttctttgagactgggtctcgctttgttgcccaggctggagtggagtggcgtgatcttggcttactgcagcctttgcctccccggctcgagcagtcctgcctcagcctccggagtagctgggaccacaggttcatgccaccatggccagccaacttttgcatgttttgtagagatggggtctcacagtgttgcccaggctggtctcaaactcctgggctcaggcgatccacctgtctcagcctcccagagtgctgggattacaattgtgagccaccacgtccagctggaagggtcaacatcttttacattctgcaagcacatctgcattttcaccccacccttcccctccttctccctttttatatcccatttttatatcgatctcttattttacaataaaactttgctgccacctgtgtgtctgaggggtg

SEQ ID NO: 3 - protein, 393 aa, Homo sapiens [sequence omitted]

SEQ ID NO: 4 - DNA, 2588 bp, Homo sapiens
gatgggattggggttttcccctcccatgtgctcaagactggcgctaaaagttttgagcttctcaaaagtctagagccaccgtccagggagcaggtagctgctgggctccggggacactttgcgttcgggctgggagcgtgctttccacgacggtgacacgcttccctggattggccagactgccttccgggtcactgccatggaggagccgcagtcagatcctagcgtcgagccccctctgagtcaggaaacattttcagacctatggaaactacttcctgaaaacaacgttctgtcccccttgccgtcccaagcaatggatgatttgatgctgtccccggacgatattgaacaatggttcactgaagacccaggtccagatgaagctcccagaatgccagaggctgctccccccgtggcccctgcaccagcagctcctacaccggcggcccctgcaccagccccctcctggcccctgtcatcttctgtcccttcccagaaaacctaccagggcagctacggtttccgtctgggcttcttgcattctgggacagccaagtctgtgacttgcacgtactcccctgccctcaacaagatgttttgccaactggccaagacctgccctgtgcagctgtgggttgattccacacccccgcccggcacccgcgtccgcgccatggccatctacaagcagtcacagcacatgacggaggttgtgaggcgctgcccccaccatgagcgctgctcagatagcgatggtctggcccctcctcagcatcttatccgagtggaaggaaatttgcgtgtggagtatttggatgacagaaacacttttcgacatagtgtggtggtgccctatgagccgcctgaggttggctctgactgtaccaccatccactacaactacatgtgtaacagttcctgcatgggcggcatgaaccggaggcccatcctcaccatcatcacactggaagactccagtggtaatctactgggacggaacagctttgaggtgcgtgtttgtgcctgtcctgggagagaccggcgcacagaggaagagaatctccgcaagaaaggggagcctcaccacgagctgcccccagggagcactaagcgagcactgcccaacaacaccagctcctctccccagccaaagaagaaaccactggatggagaatatttcacccttcagatccgtgggcgtgagcgcttcgagatgttccgagagctgaatgaggccttggaactcaaggatgcccaggctgggaaggagccaggggggagcagggctcactccagccacctgaagtccaaaaagggtcagtctacctcccgccataaaaaactcatgttcaagacagaagggcctgactcagactgacattctccacttcttgttccccactgacagcctcccacccccatctctccctcccctgccattttgggttttgggtctttgaacccttgcttgcaataggtgtgcgtcagaagcacccaggacttccatttgctttgtcccggggctccactgaacaagttggcctgcactggtgttttgttgtggggaggaggatggggagtaggacataccagcttagattttaaggtttttactgtgagggatgtttgggagatgtaagaaatgttcttgcagttaagggttagtttacaatcagccacattctaggtaggggcccacttcaccgtactaaccagggaagctgtccctcactgttgaattttctctaacttcaaggcccatatctgtgaaatgctggcatttgcacctacctcacagagtgcattgtgagggttaatgaaataatgtacatctggccttgaaaccaccttttattacatggggtctagaacttgacccccttgagggtgcttgttccctctccctgttggtcggtgggttggtagtttctacagttgggcagctggttaggtagagggagttgtcaagtctctgctggcccagccaaaccctgtctgacaacctcttggtgaaccttagtacctaaaaggaaatctcaccccatcccacaccctggaggatttcatctcttgtatatgatgatctggatccaccaagacttgttttatgctcagggtcaatttcttttttcttttttttttttttttttctttttctttgagactgggtctcgctttgttgcccaggctggagtggagtggcgtgatcttggcttactgcagcctttgcctccccggctcgagcagtcctgcctcagcctccggagtagctgggaccacaggttcatgccaccatggccagccaacttttgcatgttttgtagagatggggtctcacagtgttgcccaggctggtctcaaactcctgggctcaggcgatccacctgtctcagcctcccagagtgctgggattacaattgtgagccaccacgtccagctggaagggtcaacatcttttacattctgcaagcacatctgcattttcaccccacccttcccctccttctccctttttatatcccatttttatatcgatctcttattttacaataaaactttgctgccacctgtgtgtctgaggggtg

SEQ ID NO: 5 - protein, 393 aa, Homo sapiens [sequence omitted]

SEQ ID NO: 6 - DNA, 2651 bp, Homo sapiens
gatgggattggggttttcccctcccatgtgctcaagactggcgctaaaagttttgagcttctcaaaagtctagagccaccgtccagggagcaggtagctgctgggctccggggacactttgcgttcgggctgggagcgtgctttccacgacggtgacacgcttccctggattggcagccagactgccttccgggtcactgccatggaggagccgcagtcagatcctagcgtcgagccccctctgagtcaggaaacattttcagacctatggaaactacttcctgaaaacaacgttctgtcccccttgccgtcccaagcaatggatgatttgatgctgtccccggacgatattgaacaatggttcactgaagacccaggtccagatgaagctcccagaatgccagaggctgctccccccgtggcccctgcaccagcagctcctacaccggcggcccctgcaccagccccctcctggcccctgtcatcttctgtcccttcccagaaaacctaccagggcagctacggtttccgtctgggcttcttgcattctgggacagccaagtctgtgacttgcacgtactcccctgccctcaacaagatgttttgccaactggccaagacctgccctgtgcagctgtgggttgattccacacccccgcccggcacccgcgtccgcgccatggccatctacaagcagtcacagcacatgacggaggttgtgaggcgctgcccccaccatgagcgctgctcagatagcgatggtctggcccctcctcagcatcttatccgagtggaaggaaatttgcgtgtggagtatttggatgacagaaacacttttcgacatagtgtggtggtgccctatgagccgcctgaggttggctctgactgtaccaccatccactacaactacatgtgtaacagttcctgcatgggcggcatgaaccggaggcccatcctcaccatcatcacactggaagactccagtggtaatctactgggacggaacagctttgaggtgcgtgtttgtgcctgtcctgggagagaccggcgcacagaggaagagaatctccgcaagaaaggggagcctcaccacgagctgcccccagggagcactaagcgagcactgcccaacaacaccagctcctctccccagccaaagaagaaaccactggatggagaatatttcacccttcagatgctacttgacttacgatggtgttacttcctgataaactcgtcgtaagttgaaaatattatccgtgggcgtgagcgcttcgagatgttccgagagctgaatgaggccttggaactcaaggatgcccaggctgggaaggagccaggggggagcagggctcactccagccacctgaagtccaaaaagggtcagtctacctcccgccataaaaaactcatgttcaagacagaagggcctgactcagactgacattctccacttcttgttccccactgacagcctcccacccccatctctccctcccctgccattttgggttttgggtctttgaacccttgcttgcaataggtgtgcgtcagaagcacccaggacttccatttgctttgtcccggggctccactgaacaagttggcctgcactggtgttttgttgtggggaggaggatggggagtaggacataccagcttagattttaaggtttttactgtgagggatgtttgggagatgtaagaaatgttcttgcagttaagggttagtttacaatcagccacattctaggtaggggcccacttcaccgtactaaccagggaagctgtccctcactgttgaattttctctaacttcaaggcccatatctgtgaaatgctggcatttgcacctacctcacagagtgcattgtgagggttaatgaaataatgtacatctggccttgaaaccaccttttattacatggggtctagaacttgacccccttgagggtgcttgttccctctccctgttggtcggtgggttggtagtttctacagttgggcagctggttaggtagagggagttgtcaagtctctgctggcccagccaaaccctgtctgacaacctcttggtgaaccttagtacctaaaaggaaatctcaccccatcccacaccctggaggatttcatctcttgtatatgatgatctggatccaccaagacttgttttatgctcagggtcaatttcttttttcttttttttttttttttttctttttctttgagactgggtctcgctttgttgcccaggctggagtggagtggcgtgatcttggcttactgcagcctttgcctccccggctcgagcagtcctgcctcagcctccggagtagctgggaccacaggttcatgccaccatggccagccaacttttgcatgttttgtagagatggggtctcacagtgttgcccaggctggtctcaaactcctgggctcaggcgatccacctgtctcagcctcccagagtgctgggattacaattgtgagccaccacgtccagctggaagggtcaacatcttttacattctgcaagcacatctgcattttcaccccacccttcccctccttctccctttttatatcccatttttatatcgatctcttattttacaataaaactttgctgccacctgtgtgtctgaggggtg

SEQ ID NO: 7 - protein, 346 aa, Homo sapiens
MEEPQSDPSVEPPLSQETFSDLWKLLPENNVLSPLPSQAMDDLMLSPDDIEQWFTEDPGPDEAPRMPEAAPPVAPAPAAPTPAAPAPAPSWPLSSSVPSQKTYQGSYGFRLGFLHSGTAKSVTCTYSPALNKMFCQLAKTCPVQLWVDSTPPPGTRVRAMAIYKQSQHMTEVVRRCPHHERCSDSDGLAPPQHLIRVEGNLRVEYLDDRNTFRHSVVVPYEPPEVGSDCTTIHYNYMCNSSCMGGMNRRPILTIITLEDSSGNLLGRNSFEVRVCACPGRDRRTEEENLRKKGEPHHELPPGSTKRALPNNTSSSPQPKKKPLDGEYFTLQMLLDLRWCYFLINSS

SEQ ID NO: 8 - DNA, 2724 bp, Homo sapiens
gatgggattggggttttcccctcccatgtgctcaagactggcgctaaaagttttgagcttctcaaaagtctagagccaccgtccagggagcaggtagctgctgggctccggggacactttgcgttcgggctgggagcgtgctttccacgacggtgacacgcttccctggattggcagccagactgccttccgggtcactgccatggaggagccgcagtcagatcctagcgtcgagccccctctgagtcaggaaacattttcagacctatggaaactacttcctgaaaacaacgttctgtcccccttgccgtcccaagcaatggatgatttgatgctgtccccggacgatattgaacaatggttcactgaagacccaggtccagatgaagctcccagaatgccagaggctgctccccccgtggcccctgcaccagcagctcctacaccggcggcccctgcaccagccccctcctggcccctgtcatcttctgtcccttcccagaaaacctaccagggcagctacggtttccgtctgggcttcttgcattctgggacagccaagtctgtgacttgcacgtactcccctgccctcaacaagatgttttgccaactggccaagacctgccctgtgcagctgtgggttgattccacacccccgcccggcacccgcgtccgcgccatggccatctacaagcagtcacagcacatgacggaggttgtgaggcgctgcccccaccatgagcgctgctcagatagcgatggtctggcccctcctcagcatcttatccgagtggaaggaaatttgcgtgtggagtatttggatgacagaaacacttttcgacatagtgtggtggtgccctatgagccgcctgaggttggctctgactgtaccaccatccactacaactacatgtgtaacagttcctgcatgggcggcatgaaccggaggcccatcctcaccatcatcacactggaagactccagtggtaatctactgggacggaacagctttgaggtgcgtgtttgtgcctgtcctgggagagaccggcgcacagaggaagagaatctccgcaagaaaggggagcctcaccacgagctgcccccagggagcactaagcgagcactgcccaacaacaccagctcctctccccagccaaagaagaaaccactggatggagaatatttcacccttcaggaccagaccagctttcaaaaagaaaattgttaaagagagcatgaaaatggttctatgactttgcctgatacagatgctacttgacttacgatggtgttacttcctgataaactcgtcgtaagttgaaaatattatccgtgggcgtgagcgcttcgagatgttccgagagctgaatgaggccttggaactcaaggatgcccaggctgggaaggagccaggggggagcagggctcactccagccacctgaagtccaaaaagggtcagtctacctcccgccataaaaaactcatgttcaagacagaagggcctgactcagactgacattctccacttcttgttccccactgacagcctcccacccccatctctccctcccctgccattttgggttttgggtctttgaacccttgcttgcaataggtgtgcgtcagaagcacccaggacttccatttgctttgtcccggggctccactgaacaagttggcctgcactggtgttttgttgtggggaggaggatggggagtaggacataccagcttagattttaaggtttttactgtgagggatgtttgggagatgtaagaaatgttcttgcagttaagggttagtttacaatcagccacattctaggtaggggcccacttcaccgtactaaccagggaagctgtccctcactgttgaattttctctaacttcaaggcccatatctgtgaaatgctggcatttgcacctacctcacagagtgcattgtgagggttaatgaaataatgtacatctggccttgaaaccaccttttattacatggggtctagaacttgacccccttgagggtgcttgttccctctccctgttggtcggtgggttggtagtttctacagttgggcagctggttaggtagagggagttgtcaagtctctgctggcccagccaaaccctgtctgacaacctcttggtgaaccttagtacctaaaaggaaatctcaccccatcccacaccctggaggatttcatctcttgtatatgatgatctggatccaccaagacttgttttatgctcagggtcaatttcttttttcttttttttttttttttttctttttctttgagactgggtctcgctttgttgcccaggctggagtggagtggcgtgatcttggcttactgcagcctttgcctccccggctcgagcagtcctgcctcagcctccggagtagctgggaccacaggttcatgccaccatggccagccaacttttgcatgttttgtagagatggggtctcacagtgttgcccaggctggtctcaaactcctgggctcaggcgatccacctgtctcagcctcccagagtgctgggattacaattgtgagccaccacgtccagctggaagggtcaacatcttttacattctgcaagcacatctgcattttcaccccacccttcccctccttctccctttttatatcccatttttatatcgatctcttattttacaataaaactttgctgccacctgtgtgtctgaggggtg

SEQ ID NO: 9 - protein, 341 aa, Homo sapiens
MEEPQSDPSVEPPLSQETFSDLWKLLPENNVLSPLPSQAMDDLMLSPDDIEQWFTEDPGPDEAPRMPEAAPPVAPAPAAPTPAAPAPAPSWPLSSSVPSQKTYQGSYGFRLGFLHSGTAKSVTCTYSPALNKMFCQLAKTCPVQLWVDSTPPPGTRVRAMAIYKQSQHMTEVVRRCPHHERCSDSDGLAPPQHLIRVEGNLRVEYLDDRNTFRHSVVVPYEPPEVGSDCTTIHYNYMCNSSCMGGMNRRPILTIITLEDSSGNLLGRNSFEVRVCACPGRDRRTEEENLRKKGEPHHELPPGSTKRALPNNTSSSPQPKKKPLDGEYFTLQDQTSFQKENC

SEQ ID NO: 10 - DNA, 2271 bp, Homo sapiens
tgaggccaggagatggaggctgcagtgagctgtgatcacaccactgtgctccagcctgagtgacagagcaagaccctatctcaaaaaaaaaaaaaaaaaagaaaagctcctgaggtgtagacgccaactctctctagctcgctagtgggttgcaggaggtgcttacgcatgtttgtttctttgctgccgtcttccagttgctttatctgttcacttgtgccctgactttcaactctgtctccttcctcttcctacagtactcccctgccctcaacaagatgttttgccaactggccaagacctgccctgtgcagctgtgggttgattccacacccccgcccggcacccgcgtccgcgccatggccatctacaagcagtcacagcacatgacggaggttgtgaggcgctgcccccaccatgagcgctgctcagatagcgatggtctggcccctcctcagcatcttatccgagtggaaggaaatttgcgtgtggagtatttggatgacagaaacacttttcgacatagtgtggtggtgccctatgagccgcctgaggttggctctgactgtaccaccatccactacaactacatgtgtaacagttcctgcatgggcggcatgaaccggaggcccatcctcaccatcatcacactggaagactccagtggtaatctactgggacggaacagctttgaggtgcgtgtttgtgcctgtcctgggagagaccggcgcacagaggaagagaatctccgcaagaaaggggagcctcaccacgagctgcccccagggagcactaagcgagcactgcccaacaacaccagctcctctccccagccaaagaagaaaccactggatggagaatatttcacccttcagatccgtgggcgtgagcgcttcgagatgttccgagagctgaatgaggccttggaactcaaggatgcccaggctgggaaggagccaggggggagcagggctcactccagccacctgaagtccaaaaagggtcagtctacctcccgccataaaaaactcatgttcaagacagaagggcctgactcagactgacattctccacttcttgttccccactgacagcctcccacccccatctctccctcccctgccattttgggttttgggtctttgaacccttgcttgcaataggtgtgcgtcagaagcacccaggacttccatttgctttgtcccggggctccactgaacaagttggcctgcactggtgttttgttgtggggaggaggatggggagtaggacataccagcttagattttaaggtttttactgtgagggatgtttgggagatgtaagaaatgttcttgcagttaagggttagtttacaatcagccacattctaggtaggggcccacttcaccgtactaaccagggaagctgtccctcactgttgaattttctctaacttcaaggcccatatctgtgaaatgctggcatttgcacctacctcacagagtgcattgtgagggttaatgaaataatgtacatctggccttgaaaccaccttttattacatggggtctagaacttgacccccttgagggtgcttgttccctctccctgttggtcggtgggttggtagtttctacagttgggcagctggttaggtagagggagttgtcaagtctctgctggcccagccaaaccctgtctgacaacctcttggtgaaccttagtacctaaaaggaaatctcaccccatcccacaccctggaggatttcatctcttgtatatgatgatctggatccaccaagacttgttttatgctcagggtcaatttcttttttcttttttttttttttttttctttttctttgagactgggtctcgctttgttgcccaggctggagtggagtggcgtgatcttggcttactgcagcctttgcctccccggctcgagcagtcctgcctcagcctccggagtagctgggaccacaggttcatgccaccatggccagccaacttttgcatgttttgtagagatggggtctcacagtgttgcccaggctggtctcaaactcctgggctcaggcgatccacctgtctcagcctcccagagtgctgggattacaattgtgagccaccacgtccagctggaagggtcaacatcttttacattctgcaagcacatctgcattttcaccccacccttcccctccttctccctttttatatcccatttttatatcgatctcttattttacaataaaactttgctgccacctgtgtgtctgaggggtg

SEQ ID NO: 11 - protein, 261 aa, Homo sapiens
MFCQLAKTCPVQLWVDSTPPPGTRVRAMAIYKQSQHMTEVVRRCPHHERCSDSDGLAPPQHLIRVEGNLRVEYLDDRNTFRHSVVVPYEPPEVGSDCTTIHYNYMCNSSCMGGMNRRPILTIITLEDSSGNLLGRNSFEVRVCACPGRDRRTEEENLRKKGEPHHELPPGSTKRALPNNTSSSPQPKKKPLDGEYFTLQIRGRERFEMFRELNEALELKDAQAGKEPGGSRAHSSHLKSKKGQSTSRHKKLMFKTEGPDSD

SEQ ID NO: 12 - DNA, 2404 bp, Homo sapiens
tgaggccaggagatggaggctgcagtgagctgtgatcacaccactgtgctccagcctgagtgacagagcaagaccctatctcaaaaaaaaaaaaaaaaaagaaaagctcctgaggtgtagacgccaactctctctagctcgctagtgggttgcaggaggtgcttacgcatgtttgtttctttgctgccgtcttccagttgctttatctgttcacttgtgccctgactttcaactctgtctccttcctcttcctacagtactcccctgccctcaacaagatgttttgccaactggccaagacctgccctgtgcagctgtgggttgattccacacccccgcccggcacccgcgtccgcgccatggccatctacaagcagtcacagcacatgacggaggttgtgaggcgctgcccccaccatgagcgctgctcagatagcgatggtctggcccctcctcagcatcttatccgagtggaaggaaatttgcgtgtggagtatttggatgacagaaacacttttcgacatagtgtggtggtgccctatgagccgcctgaggttggctctgactgtaccaccatccactacaactacatgtgtaacagttcctgcatgggcggcatgaaccggaggcccatcctcaccatcatcacactggaagactccagtggtaatctactgggacggaacagctttgaggtgcgtgtttgtgcctgtcctgggagagaccggcgcacagaggaagagaatctccgcaagaaaggggagcctcaccacgagctgcccccagggagcactaagcgagcactgcccaacaacaccagctcctctccccagccaaagaagaaaccactggatggagaatatttcacccttcaggaccagaccagctttcaaaaagaaaattgttaaagagagcatgaaaatggttctatgactttgcctgatacagatgctacttgacttacgatggtgttacttcctgataaactcgtcgtaagttgaaaatattatccgtgggcgtgagcgcttcgagatgttccgagagctgaatgaggccttggaactcaaggatgcccaggctgggaaggagccaggggggagcagggctcactccagccacctgaagtccaaaaagggtcagtctacctcccgccataaaaaactcatgttcaagacagaagggcctgactcagactgacattctccacttcttgttccccactgacagcctcccacccccatctctccctcccctgccattttgggttttgggtctttgaacccttgcttgcaataggtgtgcgtcagaagcacccaggacttccatttgctttgtcccggggctccactgaacaagttggcctgcactggtgttttgttgtggggaggaggatggggagtaggacataccagcttagattttaaggtttttactgtgagggatgtttgggagatgtaagaaatgttcttgcagttaagggttagtttacaatcagccacattctaggtaggggcccacttcaccgtactaaccagggaagctgtccctcactgttgaattttctctaacttcaaggcccatatctgtgaaatgctggcatttgcacctacctcacagagtgcattgtgagggttaatgaaataatgtacatctggccttgaaaccaccttttattacatggggtctagaacttgacccccttgagggtgcttgttccctctccctgttggtcggtgggttggtagtttctacagttgggcagctggttaggtagagggagttgtcaagtctctgctggcccagccaaaccctgtctgacaacctcttggtgaaccttagtacctaaaaggaaatctcaccccatcccacaccctggaggatttcatctcttgtatatgatgatctggatccaccaagacttgttttatgctcagggtcaatttcttttttcttttttttttttttttttctttttctttgagactgggtctcgctttgttgcccaggctggagtggagtggcgtgatcttggcttactgcagcctttgcctccccggctcgagcagtcctgcctcagcctccggagtagctgggaccacaggttcatgccaccatggccagccaacttttgcatgttttgtagagatggggtctcacagtgttgcccaggctggtctcaaactcctgggctcaggcgatccacctgtctcagcctcccagagtgctgggattacaattgtgagccaccacgtccagctggaagggtcaacatcttttacattctgcaagcacatctgcattttcaccccacccttcccctccttctccctttttatatcccatttttatatcgatctcttattttacaataaaactttgctgccacctgtgtgtctgaggggtg

SEQ ID NO: 13 - protein, 209 aa, Homo sapiens
MFCQLAKTCPVQLWVDSTPPPGTRVRAMAIYKQSQHMTEVVRRCPHHERCSDSDGLAPPQHLIRVEGNLRVEYLDDRNTFRHSVVVPYEPPEVGSDCTTIHYNYMCNSSCMGGMNRRPILTIITLEDSSGNLLGRNSFEVRVCACPGRDRRTEEENLRKKGEPHHELPPGSTKRALPNNTSSSPQPKKKPLDGEYFTLQDQTSFQKENC

SEQ ID NO: 14 - DNA, 2331 bp, Homo sapiens
tgaggccaggagatggaggctgcagtgagctgtgatcacaccactgtgctccagcctgagtgacagagcaagaccctatctcaaaaaaaaaaaaaaaaaagaaaagctcctgaggtgtagacgccaactctctctagctcgctagtgggttgcaggaggtgcttacgcatgtttgtttctttgctgccgtcttccagttgctttatctgttcacttgtgccctgactttcaactctgtctccttcctcttcctacagtactcccctgccctcaacaagatgttttgccaactggccaagacctgccctgtgcagctgtgggttgattccacacccccgcccggcacccgcgtccgcgccatggccatctacaagcagtcacagcacatgacggaggttgtgaggcgctgcccccaccatgagcgctgctcagatagcgatggtctggcccctcctcagcatcttatccgagtggaaggaaatttgcgtgtggagtatttggatgacagaaacacttttcgacatagtgtggtggtgccctatgagccgcctgaggttggctctgactgtaccaccatccactacaactacatgtgtaacagttcctgcatgggcggcatgaaccggaggcccatcctcaccatcatcacactggaagactccagtggtaatctactgggacggaacagctttgaggtgcgtgtttgtgcctgtcctgggagagaccggcgcacagaggaagagaatctccgcaagaaaggggagcctcaccacgagctgcccccagggagcactaagcgagcactgcccaacaacaccagctcctctccccagccaaagaagaaaccactggatggagaatatttcacccttcagatgctacttgacttacgatggtgttacttcctgataaactcgtcgtaagttgaaaatattatccgtgggcgtgagcgcttcgagatgttccgagagctgaatgaggccttggaactcaaggatgcccaggctgggaaggagccaggggggagcagggctcactccagccacctgaagtccaaaaagggtcagtctacctcccgccataaaaaactcatgttcaagacagaagggcctgactcagactgacattctccacttcttgttccccactgacagcctcccacccccatctctccctcccctgccattttgggttttgggtctttgaacccttgcttgcaataggtgtgcgtcagaagcacccaggacttccatttgctttgtcccggggctccactgaacaagttggcctgcactggtgttttgttgtggggaggaggatggggagtaggacataccagcttagattttaaggtttttactgtgagggatgtttgggagatgtaagaaatgttcttgcagttaagggttagtttacaatcagccacattctaggtaggggcccacttcaccgtactaaccagggaagctgtccctcactgttgaattttctctaacttcaaggcccatatctgtgaaatgctggcatttgcacctacctcacagagtgcattgtgagggttaatgaaataatgtacatctggccttgaaaccaccttttattacatggggtctagaacttgacccccttgagggtgcttgttccctctccctgttggtcggtgggttggtagtttctacagttgggcagctggttaggtagagggagttgtcaagtctctgctggcccagccaaaccctgtctgacaacctcttggtgaaccttagtacctaaaaggaaatctcaccccatcccacaccctggaggatttcatctcttgtatatgatgatctggatccaccaagacttgttttatgctcagggtcaatttcttttttcttttttttttttttttttctttttctttgagactgggtctcgctttgttgcccaggctggagtggagtggcgtgatcttggcttactgcagcctttgcctccccggctcgagcagtcctgcctcagcctccggagtagctgggaccacaggttcatgccaccatggccagccaacttttgcatgttttgtagagatggggtctcacagtgttgcccaggctggtctcaaactcctgggctcaggcgatccacctgtctcagcctcccagagtgctgggattacaattgtgagccaccacgtccagctggaagggtcaacatcttttacattctgcaagcacatctgcattttcaccccacccttcccctccttctccctttttatatcccatttttatatcgatctcttattttacaataaaactttgctgccacctgtgtgtctgaggggtg

SEQ ID NO: 15 - protein, 214 aa, Homo sapiens
MFCQLAKTCPVQLWVDSTPPPGTRVRAMAIYKQSQHMTEVVRRCPHHERCSDSDGLAPPQHLIRVEGNLRVEYLDDRNTFRHSVVVPYEPPEVGSDCTTIHYNYMCNSSCMGGMNRRPILTIITLEDSSGNLLGRNSFEVRVCACPGRDRRTEEENLRKKGEPHHELPPGSTKRALPNNTSSSPQPKKKPLDGEYFTLQMLLDLRWCYFLINSS

SEQ ID NO: 16 - DNA, 2708 bp, Homo sapiens
gatgggattggggttttcccctcccatgtgctcaagactggcgctaaaagttttgagcttctcaaaagtctagagccaccgtccagggagcaggtagctgctgggctccggggacactttgcgttcgggctgggagcgtgctttccacgacggtgacacgcttccctggattggcagccagactgccttccgggtcactgccatggaggagccgcagtcagatcctagcgtcgagccccctctgagtcaggaaacattttcagacctatggaaactgtgagtggatccattggaagggcaggcccaccacccccaccccaaccccagccccctagcagagacctgtgggaagcgaaaattccatgggactgactttctgctcttgtctttcagacttcctgaaaacaacgttctgtcccccttgccgtcccaagcaatggatgatttgatgctgtccccggacgatattgaacaatggttcactgaagacccaggtccagatgaagctcccagaatgccagaggctgctccccccgtggcccctgcaccagcagctcctacaccggcggcccctgcaccagccccctcctggcccctgtcatcttctgtcccttcccagaaaacctaccagggcagctacggtttccgtctgggcttcttgcattctgggacagccaagtctgtgacttgcacgtactcccctgccctcaacaagatgttttgccaactggccaagacctgccctgtgcagctgtgggttgattccacacccccgcccggcacccgcgtccgcgccatggccatctacaagcagtcacagcacatgacggaggttgtgaggcgctgcccccaccatgagcgctgctcagatagcgatggtctggcccctcctcagcatcttatccgagtggaaggaaatttgcgtgtggagtatttggatgacagaaacacttttcgacatagtgtggtggtgccctatgagccgcctgaggttggctctgactgtaccaccatccactacaactacatgtgtaacagttcctgcatgggcggcatgaaccggaggcccatcctcaccatcatcacactggaagactccagtggtaatctactgggacggaacagctttgaggtgcgtgtttgtgcctgtcctgggagagaccggcgcacagaggaagagaatctccgcaagaaaggggagcctcaccacgagctgcccccagggagcactaagcgagcactgcccaacaacaccagctcctctccccagccaaagaagaaaccactggatggagaatatttcacccttcagatccgtgggcgtgagcgcttcgagatgttccgagagctgaatgaggccttggaactcaaggatgcccaggctgggaaggagccaggggggagcagggctcactccagccacctgaagtccaaaaagggtcagtctacctcccgccataaaaaactcatgttcaagacagaagggcctgactcagactgacattctccacttcttgttccccactgacagcctcccacccccatctctccctcccctgccattttgggttttgggtctttgaacccttgcttgcaataggtgtgcgtcagaagcacccaggacttccatttgctttgtcccggggctccactgaacaagttggcctgcactggtgttttgttgtggggaggaggatggggagtaggacataccagcttagattttaaggtttttactgtgagggatgtttgggagatgtaagaaatgttcttgcagttaagggttagtttacaatcagccacattctaggtaggggcccacttcaccgtactaaccagggaagctgtccctcactgttgaattttctctaacttcaaggcccatatctgtgaaatgctggcatttgcacctacctcacagagtgcattgtgagggttaatgaaataatgtacatctggccttgaaaccaccttttattacatggggtctagaacttgacccccttgagggtgcttgttccctctccctgttggtcggtgggttggtagtttctacagttgggcagctggttaggtagagggagttgtcaagtctctgctggcccagccaaaccctgtctgacaacctcttggtgaaccttagtacctaaaaggaaatctcaccccatcccacaccctggaggatttcatctcttgtatatgatgatctggatccaccaagacttgttttatgctcagggtcaatttcttttttcttttttttttttttttttctttttctttgagactgggtctcgctttgttgcccaggctggagtggagtggcgtgatcttggcttactgcagcctttgcctccccggctcgagcagtcctgcctcagcctccggagtagctgggaccacaggttcatgccaccatggccagccaacttttgcatgttttgtagagatggggtctcacagtgttgcccaggctggtctcaaactcctgggctcaggcgatccacctgtctcagcctcccagagtgctgggattacaattgtgagccaccacgtccagctggaagggtcaacatcttttacattctgcaagcacatctgcattttcaccccacccttcccctccttctccctttttatatcccatttttatatcgatctcttattttacaataaaactttgctgccacctgtgtgtctgaggggtg

SEQ ID NO: 17 - protein, 354 aa, Homo sapiens
MDDLMLSPDDIEQWFTEDPGPDEAPRMPEAAPPVAPAPAAPTPAAPAPAPSWPLSSSVPSQKTYQGSYGFRLGFLHSGTAKSVTCTYSPALNKMFCQLAKTCPVQLWVDSTPPPGTRVRAMAIYKQSQHMTEVVRRCPHHERCSDSDGLAPPQHLIRVEGNLRVEYLDDRNTFRHSVVVPYEPPEVGSDCTTIHYNYMCNSSCMGGMNRRPILTIITLEDSSGNLLGRNSFEVRVCACPGRDRRTEEENLRKKGEPHHELPPGSTKRALPNNTSSSPQPKKKPLDGEYFTLQIRGRERFEMFRELNEALELKDAQAGKEPGGSRAHSSHLKSKKGQSTSRHKKLMFKTEGPDSD

SEQ ID NO: 18 - DNA, 2651 bp, Homo sapiens; identical to SEQ ID NO: 6

SEQ ID NO: 19 - protein, 307 aa, Homo sapiens
MDDLMLSPDDIEQWFTEDPGPDEAPRMPEAAPPVAPAPAAPTPAAPAPAPSWPLSSSVPSQKTYQGSYGFRLGFLHSGTAKSVTCTYSPALNKMFCQLAKTCPVQLWVDSTPPPGTRVRAMAIYKQSQHMTEVVRRCPHHERCSDSDGLAPPQHLIRVEGNLRVEYLDDRNTFRHSVVVPYEPPEVGSDCTTIHYNYMCNSSCMGGMNRRPILTIITLEDSSGNLLGRNSFEVRVCACPGRDRRTEEENLRKKGEPHHELPPGSTKRALPNNTSSSPQPKKKPLDGEYFTLQMLLDLRWCYFLINSS

SEQ ID NO: 20 - DNA, 2724 bp, Homo sapiens; identical to SEQ ID NO: 8

SEQ ID NO: 21 - protein, 302 aa, Homo sapiens
MDDLMLSPDDIEQWFTEDPGPDEAPRMPEAAPPVAPAPAAPTPAAPAPAPSWPLSSSVPSQKTYQGSYGFRLGFLHSGTAKSVTCTYSPALNKMFCQLAKTCPVQLWVDSTPPPGTRVRAMAIYKQSQHMTEVVRRCPHHERCSDSDGLAPPQHLIRVEGNLRVEYLDDRNTFRHSVVVPYEPPEVGSDCTTIHYNYMCNSSCMGGMNRRPILTIITLEDSSGNLLGRNSFEVRVCACPGRDRRTEEENLRKKGEPHHELPPGSTKRALPNNTSSSPQPKKKPLDGEYFTLQDQTSFQKENC

SEQ ID NO: 22 - DNA, 2271 bp, Homo sapiens; identical to SEQ ID NO: 10

SEQ ID NO: 23 - protein, 234 aa, Homo sapiens
MAIYKQSQHMTEVVRRCPHHERCSDSDGLAPPQHLIRVEGNLRVEYLDDRNTFRHSVVVPYEPPEVGSDCTTIHYNYMCNSSCMGGMNRRPILTIITLEDSSGNLLGRNSFEVRVCACPGRDRRTEEENLRKKGEPHHELPPGSTKRALPNNTSSSPQPKKKPLDGEYFTLQIRGRERFEMFRELNEALELKDAQAGKEPGGSRAHSSHLKSKKGQSTSRHKKLMFKTEGPDSD

SEQ ID NO: 24 - DNA, 2404 bp, Homo sapiens; identical to SEQ ID NO: 12

SEQ ID NO: 25 - protein, 182 aa, Homo sapiens
MAIYKQSQHMTEVVRRCPHHERCSDSDGLAPPQHLIRVEGNLRVEYLDDRNTFRHSVVVPYEPPEVGSDCTTIHYNYMCNSSCMGGMNRRPILTIITLEDSSGNLLGRNSFEVRVCACPGRDRRTEEENLRKKGEPHHELPPGSTKRALPNNTSSSPQPKKKPLDGEYFTLQDQTSFQKENC

SEQ ID NO: 26 - DNA, 2331 bp, Homo sapiens; identical to SEQ ID NO: 14

SEQ ID NO: 27 - protein, 187 aa, Homo sapiens
MAIYKQSQHMTEVVRRCPHHERCSDSDGLAPPQHLIRVEGNLRVEYLDDRNTFRHSVVVPYEPPEVGSDCTTIHYNYMCNSSCMGGMNRRPILTIITLEDSSGNLLGRNSFEVRVCACPGRDRRTEEENLRKKGEPHHELPPGSTKRALPNNTSSSPQPKKKPLDGEYFTLQMLLDLRWCYFLINSS

SEQ ID NO: 28 - DNA, 2591 bp, Homo sapiens; identical to SEQ ID NO: 2

SEQ ID NO: 29 - protein, 354 aa, Homo sapiens; identical to SEQ ID NO: 17

SEQ ID NO: 30 - DNA, 2588 bp, Homo sapiens; identical to SEQ ID NO: 4

SEQ ID NO: 31 - protein, 354 aa, Homo sapiens; identical to SEQ ID NO: 17

SEQ ID NO: 32 - DNA, 121736 bp, Homo sapiens
cccactgtgccaaaggcagatgggatggtttgagaagagcatggatggagaagacacgtctctgtcaggatgttgggggcaagggtagacctactgccacttttctcttttgagtcaggagtgtaggagctaagccttccgctggagaccctgggtagaggatgttagaggagcatgtgacctgtgagggggctgggagggcccctgtggtagtcactggtgctaactctatctagttctccccactttgaggcccatggtagcatttacttcctggtccttgtaagtgaatggagctgtgtgactgcctatagtgacaagtgccttttgtcaatgggacaccctctggtactctccttgagatagtggcttttctgtcgaccagggtccctgagtattcaatgagcagagccccctacctctacccctctgcaaacctgcgatagacatgtgacacgggcaagagaaggaactttcgcggttcgttggtaatctactgaagaaatgtaatgtacagttggactatgctctattttttttattgtggtaaaatagacataacatgaaatttatcattttaacctttttttttttgagacggagtctcactctgttgcccaggctggagtgcagtggtgcaatctcggctcactgcaagctccacctcctgggttcaagtgattctcctgcttcagcctccccagtagctgggactacaggcgcctgcctccatgcccagctaatttttgtatttttagtagagatggggtttcaccatgttggccaggatggtctccatctcttgaccttgtgatccacctgccttggcctcccaaagtgctgggattacaggtgtgagccaccgcgcccggccttttttttttttttttgaaatggagtttcactcttgttgcccaggctgccgtgcagtggcatgatctcggctcactaaaatgttcgcctcctgggttcaagcgattttcctgcctcagcctcctgagtagctaggattacaggggccttccaccacacctggctaatttttgtatttttagtagagacggggtttcaccaggttggccaggctggtcttgaactcctgacctcaggtgatccacctgactcagcctcccaaagtgctggaattaaaggtgtgagccatcacacccggaccttttaatctttttttttgagacagagtctcgctctgtcgcccaggctggagtgcagtggcatgatctcggctcactgcaacctctgcctcccaggttcaggcgattctcctgcctcagcctcccaagtagctgggactacaggcgcccgccaccacgcccggctttttttttgtatttttagtagagacggggtttcaccgtgttagccaggatggtctcgatctcctgacctcgtgatccatctgccttggcctcccaaagtgttaggattacaggagtgagccactgcgcccggcctaatcatttttaagtgtatagttcagtgtcataagtacaaccaccaccgccatccatctccagaactttttcatcttcccaaactgaaactctatccccgttaaataccaagtccccattccccctccccgcagcccctggcacccaccattccacttctgtctctatgagtctgactactccaggaccctcatatgagtggaatcctacagtatttatgcatttgtgtctgcctcatttcatttagcatagtatcctcaaggttcatgcatgttgttaacaggtgtcaggactccctcctttttaaggctggatcatcttctattgtgtggatagactgcattttgcttattcattcatcagctgataacatcaggttgcctccacttttggctattgtgaataatgctgctataaacattggtgtacagatatctactccaatctctgcttttggccgggcatggtggctcacgcctgtaatcccagcactttgggaggctgaggcaggtggatcacctgaggtcaggagttcaagaccagcctggccaccatggtgaaaccccgtctctactaaaaattaaaaaattagccaggcatggtggtgggcacctgtaatcccagctatttgggaggctgacacaggagaatcacttgaacccaggaggcacaggttgcagtgagccgagatcacgccactgcactctagcctggacaataagagggaaactccatctcaaaagcaaaacaaaagaaaacaacacaacaaaaaacaaacaaaaaaatttctgctttcaattattttgactgtacaccggaagtggaactgctgggttatatggtaattctatgtttaattttttttgaggtactaccatactgttttccatagaaactttgtggttttgagtcactgagatttggagttgtttgttactgcaggacaacctagcctgtcctgatactgccacataccctagataatctaggatcagccaggattctgatgaggccacagtgcggcagacacaagtgaggggtgtagaagccgagaggctaaaccaacctgagttaacccagtatgaggtgcagtgatgagggttagctagcacagatatgcctcctcttgggaccaaagacattaaggtcagggtctggaaccaaccctgtagccaaacggttgtttcttaacagacataaaccccctaacacagtcaccttggacctcttgaccccagcaacccatacatccaaggttacatactttaccatactaagtgactttggtggctcctaataatgtcatcataaatagccctattgaatagaaatttacatttgctcatcatggccctgagaatttcagctttttttttttttttttttttttgagacaaagtcttgctgtgttacccaggctggagtgcagtagcacgatatcagctcactgcaacttccgccacccaggttcaagcgattctcctgcctcagcctcccgagtaactgggtttacaagcatgcgccatgacacccagctaattttgtattttaagtagagacggggtttcaccatgttagccaggctggtcttgaactcctgacctcaagtgatcctcccgcctcggcctcccaaagtgctggggttacaggcgtgagccactgcacccactgaatttcagcttcttaagagcaactatgtttcaaaagtgtggtgtgggctgggcacgatggctcatgcctgtcatcccaacaccttgggagcctgagataggagcatcacctgagcccaggagttcaagaccagcctgatcaacatagagaggcccctatctctacaaataataataataaattagccaggcatggtggtgtgcatctatagtcccagatactcagaaggctgaggcaggaggattggttgagcccagaatgtcgaggctacagtgagccatgatcactccactgcactccagtctgggcaacagagcgagactgtgtctcaataaaagaaaaaaaaaaaagatgtgatgtggggtgatttcagagccggatgaacctggctttgaatcctgactctgccacttcccaactgtatggctttgactaagactgagcctcagtttcttcatctgtagcgtgaggagagtacaagccatatcacagggctagtgaagactagagaaaataccatgtctggtgcctggcacatagtagacactcagtaaacagtcgctgctgtttggggccgtgttatatgtaagcccttgatgaaggcagaggtatctcagtcatccttctataaacggtcttctcctttgccaagctgggtgcgccatttagagtgttcacggatgcccctcctgatgtagaaagcgaacagcccaggagggtcacatgttaattccaccaaggtttactgagaatctcctagcaccaagtgctgggctacagggatgacagacgcggcccctgtcctcacagagcactgggagtctctgggccggtggggaccatggacagcagggcctatcatcagtagggcggggtggccacttgagtgagggtgacactgaaaacggccagaactatggcctagaagctggtctcagatatcgaggctcagggtgggggttggggagacggagggacctggaagcattggagaacctcccgaaggaaaaccttcccgtctgtatgaaaggtcagctcccggtcccagagaacttggcaactcggttctgtgacgctaaaagggtggcgttgggggggcgggtgctgggctgcatggggagaagggaaaagtaggatccgcttcactgtgaagtgagtcccaccaccaactccagcaatccctgcccacaagtaggatggcgggtccctgggaagggagcacgccatgtcctgtgccagtcagggagctcagggcactgtgatatagctgaagtgctgagtagaattcggggtgcagagctgcgggtggctggtggggtgctggggcgcgcaaggaggctggaggcgggggtgggggggtgcccagccccaagtcctacagcggctgctggaggagtgagatgagcacatagtgagtggctgtgctggtggaattagacagaggtgccccaagtcaggaacctagagccctgagcgctccatggggaaggagaacagcccccacggtgaaggggtgagggcggtgtgtaggcacacacagaatcttccagctggaagagaccttcaatgtcatttcattcaacctcccacctcatgaaatctttcagtcttccagtgcccaactgaggacacccaactctacttggacacctcaaggtacggggaactcactcccttcaaggcagctcatctcagagaggctttggagcctgcgggacggccaggaggagcctggcgctccgaccttggccctgtagagcagagtggcctctactccgcggcggcacctggctgggggttgcggcgcggttgggccagcgctgctgtccccagccccagtgctgaggcaggcagagcgcagtgggctctggcggaggtcgggagaactgcagggcgaaggccgccgggggctccgcgggctgcggggggaggcacttgacaccggcccggggagaggaggggccgctgtccctgcggccagtgctggatgcggggacccagcgcagaagcagcgccaggtagcggggcgcccagcgtggggagggctgcggcgaggcccggagctcggctacgactcgaggggctctgagtggccgggagcgcggccgaggcggggcgcccggggcccggcccccggtctgggcggtgcggggtccagacctccgccaagcggcgtgcggggaccccggcggggccgcagaggccgggaagtcgcgccgagggcgctaggaccggccgcgcgcccaggccgctcccgccgcggcgccccggggccccccagtcggcgctgcctcccgggccggctccgcagcgccggggccggggccagcgcggccgcggggggcgagcggcgggcggaggcctgggcccgcgggcggccggagggagggaaggaggaaggcggagagaaggggtgggagggggggacccggcggaggaggcggagagagggagcgcgacagcgagcggagggagggagcgagcgagcgaggcaggcaggcgggccgggagggagggagggcgcgcgggcggcggcggcggcgagagcagaggacgagccgggacgcggcgccgcggcaccagggcgcgcagccgggccggcccgaccccaccggccatacggtaatgagcgccgctgctggcggcccggaaggccggcccggaggcggcggggagccggggagccgggcggggggcgccgcggctggcagtgcccggctcggggcacgctcccggacccctgcaactcggcgccgggcgcccgtggggccgggactgcaggcggggacggcgggccgggctggccggggcggcgcgggggatttgagggtttgtttatgtccccgcgggctcggcaggcgccccctcccgtcccgcccgctcccggcgcggacccccctccccgcccccgcccggctccgggctcaagttcaagtctatacaatgccgcggggggcccctccaccgccggcctgcgccgcggtgcccggctcgccgctgccgcaggggccccggccgggccgcccccgccttccgggctctgccccagccccgcggccccgcctggagcccgcggccagggcgccggagggcgcggaccccgacccagaaggatcggcccccgcggcggcccgggggagcgggggagggggcgggggccgggccccgcgcaggctccgcggcggcggcagaaaatggcagcctggcacgacccggccccccgcccctccccccggcgcccggccctcctcggccccgcggggcgggggacccgggaggcccccgggggcgggccgaggggtgatggcggggccgggccggggagcgccgcgccgcgatcctcctccggccacctgtggctgggggtgcggggcgccggcggggccgggaggggcggcggggccggggagagcgcccgccttgggggcacaccttcccccggagtgccggcggcacggagaggggtggtcgtgcccggctcctccctgtccccaccgcgggccgtgggtgcccgggcggccgcggtggcggcgccgcaatgtgggggcggggcgggggcgggcgaggatcccgggcccgggcccgggccgcgggggccggaaaacgcgggggtggaagtagcggggccgggaccgggagcggcgcagggggggtacgcccggggtcgcccctccagcacccccgcgcacactcccacgcacgcggacacactcacgcacacgcaccccgccgggccggtgcagacgtgtccttgaaagcttcgcatctgcacagtgaaggacgaggcctcgccgcggctgcggagcggggtcttcggccccacgtccccgcaccccgggagacctcgagcttcggagccgcaggcggcggctgtccgtgtcccgccctcaccccagttcccctcccccaggccgccctgccttccctccccttcggcgcggaccgggctggcgcgggtccagggcccgcccctggcctcccccagcccctcatcgctggggcccgcggccctggggctgccaaactgcttttcgctttcctgaagcctcccttcttgggggcaccctctcccaccccagcgcccctctgccatttctccccctctcctcatcccctccgtcctggcaccctctctccgctgcacggccagttgaggaggtgttggcgccctgggcggggagcagtgccctctggttcccaggggctgcctcccccggctcctgaggggagccccctgcggctgcaccttgacccaacatggcgtctggcacccagcagggcagctctggcctgcggcaggcgggagggtgggcagggccgagccccagggccgcgcagctaccccccctccaaaccagcggggacagaagccttggggagaagcgctgtccgccctgtgacccaacttgcccctcactgccgtgcccagagactgccatcagcatccctgagggcctgctcagtcttcatgtttcaccctaggctgccagcggctgaacccgcctcctgggcgggcggctacgaagggatcctgggatcaggtgctgctccagtgtcgcctcctccctcgcgggcagatgtgacagctgcagccaggggagctattcgccttgctattgcctgggtgttaggactggcctgtgggatttggggggccaggcatcccggggaccctctttggttggctagcaggggccatctccaggtagttttctgagctgcctgcctttggagagttgggttgtagggagttcctgctgggtttctggggcaaaatggtccccctctgcctccaggttctaccgaggccctgcttgggctgtgacaggtggctctgtcaaggtgggagtctgtgtgtgcacatgtgctggctccaggcgagggaccaggctggcctgtgcagcagctctggcacctgcctgcctccctggtgggtccccctcctctgtgcagctcctccccagataagcagctgcggattcaggccgaccaaacttccctcgttaccccacccaggcaccagtgccttccataggagactgaccctaagaaaggtgaattccttctagactcaaggagtggactggtccacagggctgccctctgagtccttcctggagaagcctaggaaaggacgccagcagccatctgtcagggtgtctgcggacaggattcctctgtggggtgggggttggactagagccggaaggtccattccagctttgacattctatggctctgattctagtggtggaatttcaggcctagcaatggggacagggtggtctgtttttcggcacatggcagtaataggggaaggcttccaaggagaaggagatatgagagagatcagggcgcccagcgagttgggccttgggaaggagaggcagtgtgaggagggtccctgcaagagacgggttggtcacgtccgactctgcagagggtgtaaaaagtacagcctcctttaagcctcggcacgtgtgtatcctgtaggtttgtgtataaatccctgtgtgtggataatttctgaggtttccttttcaagtccaattcacagtaagctcctcagtcccttatggatgttttactatcgctttcacacccacctctgccagtggttctcaaaaagctaggaagacaggacaaacggtaaaatccttgtccagggtcaccggcaggaagaagtggagccaggcctgcactcgggggaagatgccccatgctatacctcttacctgggctgctgcatgtgtctgtccccgctctcagtttgtgatctccaggaaacaggggccttgcctccctgggtccccattggacaagcggtgaggcctccgagggtgtctgctgagcgaggggagcgcactgccctccagtcctctccccgaggcagcgaggcaggttagtgctgggctcccttccccctgctgctgtgcgccgctgcccagcggccactgcctacttacaggccagctcctcagggtcacacctccctgaaagacccaagttctttcccagcaagagccagactcccccaaggcttctctttttgggatccaggtagaaagaggactctaatgggtgagttaaaacagaccaccctctccccatctttgggcccgaaatgtcagcattagaacccaaaccttagaattgcagtctgaaagaggagtttaagctctgagagctcttagtgctgggtacgggactgtttgtgggaggtggtgcccagttcttcccagggttgtccatgctacccagagcctgaggcctggagggccattcacgtgccagtcacatgcctctcccagggtacttcctgctgcctccaacttgctggcctggggtcctggacttggtgctcgtatcctccccaccccgtgccccactgggagttgagtgtgtctctggcctccagcaggtagggccagagcatctaccccaatgccattccccatgctgcggccctcggggaatagcttctacttttgtttgaatattagtatgtgagcagagagcccgtcagaagcccacctggcctgaggctgggtttctgcagggactttgctgttcctgagcagggctttaatggtctactaaaggtgccagatccctttccactttaattttgagggctcattttcaatcatttctctctgacgatttttccctaagaacatgaccaaatctgagatccatgaagtgtcagcctgagatttatgtctgtatccgagcctgcctccacttggctaagtgtgtgggcaagacgaggttcagtgcacatgtgtctgtgcatgatgtgtgtgtacgtggtgtgccgccacctgtggatgggtaggacttgcttccacatgagccagtgtcaaggcagcttgaggccctcgagtcacagggagctgcactctgacacctcccagcggcaggaacttgggcaacaactcgattccctgggcctcagtttcctcacctgtaacatgggagtgtgcgtggattctgcttacaggtggttgtgaggatggagtgagatcatgtgcgttacagccttagaggagcgggagccctcctgttagctgtgtctgttttcatcatttgggtggctcacgtggactagcactgcaggaagtgctctaagaagcctcgtccaccttcctgtgtcttttgcagaatcttggtcagatgaggaaagtgccgattctgattaaaaatcctgggaggtgggaggcttctcagcgacacttagcaatctgttgagttgaacaaatctcgtgtcaacaggttgttttgcttccacctgaaatccctcccgctgtagtttcagctcgttattctcatcctgtcttgagtgcagcagcactttcccaccgtattcgcttccattttccagagatgtgctgagcatttcctgtaagccatgccctgtgctggctttgaggggacacggtgtgtttaggatgcgcccagctaacgaagaactgcagagtgggactggggtcactggagagggagaaataaagtgctcaaaggagagtgaggtcacaaccaactaaggtcatcagggaaggcttcttgaaggaggtggcatctcagaagcgccccagagcacagaagtggggcttcaggggcaggacatcattgtgggtggctgtagtgcccgggaggtggactggggcctgggttgtgctggaggccaggctgaggccctgccttggtttggggaggagatccctgcactccggaactcctctgtggcccacggaggatcgctctgaactgcctcagcgtggcggccagtgggggtaggggtggagagaggacagcagggagggaggggaaggggccaaatgagctcatttggtgtcggatcctgattctttctattccatagaccagagcttaagagctcagacttggagagcaacagaacagggtttaaattacactgaccccagggggttgtgacgattaagggggaggccagggtcaggtctggtctgcgagcgagtgatagcagtcatggttgaggatgtggcaggtggagaagggtcccttttctggcctcccagaggtctccatgtccccccttgcccactccatcaggctgaggcgccccagcatccagaacattcctgcaaggggctgccagtgccagggaaatgggggtgaagacgtcaggttcctgtctctgcagcctgaccctgtcccccaacacacacgctgggcagaaccgagccaccaacccagaggggaggtgccctgcagacggcccaggcccccaggcatgagtgcaggtgcctggcagccccctgcaagaacagctggtgggcagggccttctgggccaaatctcccttgctgatcacatcacaggccaccaacctgtctggaggacagcaagggtgcttggtgggcagtggaggtgggggtaagggaggtgcagacgcctggggctttcctagctaaatcccagtatggagtggtttgtttttttttttcagcagcagctctatgttgcctactcctgtcctactgtggtcctctctgacccttaaaggctgcccagccttatttagatatatgaccaggttcctattttctctttcctgtggtcacggccctgctcaccaccatccctattgatctttcctctctgcttctgtttcaaatgtcaaggtcatttttaattctgagccagttattagctgccccgtctgagtgcacagaggggacggaggaccatctcttatagccagtaaccggagagctggaacttgggtctcctgactcctagtctaatgctcttcttactataatgaaaggggaggggggctcagtgcagatgttcgagatctgatagatcagctgggtcatgggttccagtgatccttccttgaaaaggtaaaaagatgcttagagattatggggtgtgggttagatttgcatctcactaagctgttgagtgtgggctgtgtcctggggaatacttgggaacggccatggtctgggggcaggaggccttcggagtgtccctcccccgccactccctggaggaccccgggagacacaggcgagttcgcccctgcccctgccaagccagtgggattccccagcaccccagtgagcagaacctgtttggaaagaggcttctggaaggcctgcacgattacttgtataggttcccgaagtgataaataaatgcatgggtaaaggggaatccacttagattccctaaaagcctttgaaacaaggtggtaggcgagtctgttctgatgtgttagatccccatgcagtagtgttgtggttaaaaaaaaaaagttcatagtgtaatctcagttttgtgaaattctttaaaatcgatacaaatatacacatgtttaggtttgcacatgcatggaaaagttgttctggaaagatacacacaaacctgtcaacaagtttttgctttttaactttgtacactttcgttttctttgaaaaaatgtaaatgaacttgagttactttcttaatgacaacaacaaaaataaaactacactttttaaaagcctgtggatgagaaagtagaaaaaagaattaagtcacctaaggctgagggatggactcttttttataatggataagaaactggtttagagactgacagcaaggggtaagcttactcaggtacgtgtcttttccggaaaggttgcagggagaaatatcgcagatattaaggcctctgagcaaaggcctaggctggtagggattaggtgagagcagaaaataggccgctgactgcatgcaccctggcccacgccagggacaggggacaaagttagctttataggatggcgacttgaaactcatttctgacccaaagtggagaacaaatcactgaggatcttcccccaaaagcatcagtctgatgggctgttgtggcccaaatggttcctggggaactggaggtataactggggcccggcccgggtatggagctcaggtgacccagccctggcatagtgagagcctcttgggaggccacacccaagggagacaaagtggggcttcaggaggccccacgaaggggtagaaggggtgtctaggaacttgcttggcacgtgggttcaactctgatctaggggtccctgagcaggtggtgatcacccagatgatggggtggagaggtgaggtgggggcaaatacaagttcctctgtctgcagtcgtcttgctaccccaggaagctcagggctggttgcttagcaacagcacttaccaccctcttccaccttaccctcccgcaccccacccatgggtgcctcttggggcttcccttcccccgaggctgcccctgttcaataggacatgggaagggtctgtgcacttttttgaccctgcccctggaataaggcaggaacagacataaaaggacctatgacttggaggcaagcacagaactggcccctctacaaaccagctgtttaatccaaggctggtaggggacagatgtgcagggcaaaaaaggcgttcgggagtcaggccgacctggaggactgtctcagccccatttgtgctcagttgctgctggccccaaaccacctggagctgcaggtttttcatctgtaaatcggggataagaatagcagtctcatcttacaggggttgcctgaatgacgtgcaatattttgtgaaacagctagcactatgcctggcacagagaaggtgctcaggaggcatgagctgcttttctttacgtgggggttgttccagggctgcctggttagggtgacccccacaaagccctgctgctctgtaaggccctgctgctctgtaagaccctgcaagtggccaggtgcagtggctcacgcctgtaatcccagcgctttgggaggccgaggcgggtggatcatctgaggtgaggagttcgagaccagcctggccaacatggtgaaaccacctctctactaaaaatacaaaaatttagctgggtgtgatggtgcacgcctgtaatcccagctactccggaggctgaggcaggagaatcacttgaacccgggaggtggaggttgcagtgagccgagatcgcgccactgcactccagcctgggcgacagagtgagacttcgtctcaaaagaaaaaaaaaaaaaagacctgcaagtgtggcctgtcctccccatggcccctcacggtgaggggaagagataatcaagttgagaatgacccccaagcccatggtggactctgggctgggagtcaggggccacaggggagtggcagggatagagaaagatgtctctgtcctccttagcttccgttatctgacccaggtccctttttccagctgccaataagttgtccctttttctcttagcctttctgcacctccacttcttcctgtgaagccaggatttgcctgtaccttttttgatctcttcagagtcccctgtccatgtggggacccagtagcctgctcaaggcctgggccctctttccctccctgcccactggtctctttggagctaagcggagagtggcctttgctgggttctggctctgccccacggcctggaggcaggggagggtctagaccacagcccggcctggcagctggcacgcagcaagggctcctaatggttttattaccagcaacaatgtggtgcttgttgccatccacgcacaggctggtggttcccagcccaactggtggtggcctgagggccctgcctggtactggaagctcagctgggaagcccagtggggctgggcagtcagtcacctctgcgttttcttctgtcaacaccctgccagcagcctggaatcagagggagccagggcacggcatggcgagatgctggcccccgagttggcaggcctggcagcacttgagttttctttccagaggtccctgcctcagatccacaaatgatgttcatccattcatctaagagacctactgtgtgccagacacaggctgcatagatgaagggggtcacactcatctcaatgaccctgcagcttaggtggggtctggcagggcggaaggacccctggcacaccatgtccagggattaccagggctcagagaaggaagtcggattcagggggagagaagatctggaagggctttctaaaggaggtgacgcttgagctgagtctcgaagcggagggagcagttagctaggtggacgacggcactttctggccccatgtggctgcagtgtagggaacgatgggatacgaagccaggggcctgggccgggggacatggaaggcgggatgttatgaacggacgttgggcttgggatttatatttgagaaggatcattctagggcatcgaggacgagagctcgggcaatagggtttaggggcagggagcccgggtggaaggctggcacagaagtccggggcagcaatgtgggcctggacagggtgtgcgtggtgtgacatttaggaagtgcagtcagtaggaacaggcgggataaaagcaatgaggggagttggggtggctgtctggtttctagctcagccaactgtgtgggtggggatgcccttcatggagggggcatgggttggggggagtcggagagagcaggaggtgcctcccacatggagctgggttgtagctggggcttgagggcgggtgggatttccccagggggaggctgagccaggccaggcttgcagaaggaggctggagcctgagtcataaggcctggaggcggggtgccttgtgcgatggatgagaaaggcaggtgcatttcagtctgtaactggtacgacccctgcagatgtttgaaggaagattttgaggaaggtgctcgcacccttgcattgggaatgctgatgagttagcgcctctacttcacagtgatttccccaaaagatgagctgcaaggcctagaccctggccctccacccaggacctgcggcgagcatcatcaccgtctgagaatctttgggtgggctggaagttgatgtcaagctgtccagcctttccgtcactctccattcagaggcaggtctgcggagagagataggagggacaagctggggacagcatttttggaaagcaaacagaaaagaagcaaaaactgttcctctaaaatagaaaggaggcttatgtgtgttatgtgaaggataatgtggaaggctatttccaaagaatttctcaaaaaatgacgtgagccatgtcagcatcattgaatttagatagaggccaggagcagtgtggcatcgtgctggggccaccaggctggggactggacagatgatggtttcacctcacccctgccacctccttgctgcgtgtcattggaagatcactcaacctttcttaggctcagttttaccatctgtaaaatggacataacttcacaggctggtgttgtttgttttgagcattgcttcttggactaaacctggatattttttccttccctccctcgcttctgcacttcctctggttctttgcctcccaagaagcctgtttcctcctgttccctccaaaactccaagttttgagttcccccttcctgggaaggtccattcgtcatgttctattgactctcttgttcccaattattccctgcaaacctggttcacccagtgtatttgaagagcatctactgagctaaatgggagttattgggggtcagttcctgttttctttttaataaggggagggagggtctgtgcagagctgtccgggagagcagagggcatgggggacaggggggatgttgcaggacccagtgggaccacagctgggaccttgccctgtagctggctcagtgtgccaggggataggggcacagagccctggtgggtctgggagatgagcttgggaaggacttggcctggacatgggctaggctgccctgctttccgagccagacctcaggagatggcagagagggccgcttcctctgtgagggccgtacatgatggcccttgggctgtatggtggccttgtgacatgcagccacacccctggggagacctttgaagcatctctgcattctggaggatctgctgggaagatggcttcgcagcggggctcttgttgatgctgccaagaaggccgggtgggagtcgggctgtctctggctgggggtggggtgggggctgcggtccatccgagtgtggaaatccacgtttctctggtttgtgcagacctgtgcaagcagccatgctgcaggactggccccctggaagtggggcatacatgaactcagggtgtggcgttgtaatcaaatgaaatgtacagcataattaatctggcatacccttaatgatatgcataattgtgctgcatggtaattaggtgtaaatggtaagcagttcacataaatgtttttgtaattggtattaattttgcagaggcaaaccaagtttatgtggtttttctcttcttgctctgttagttttctagtacaggcatttccaagcttttggaggaattctattgcaaatgtttgtttatagggcaatgttttgtgttttctctcagaacaatgttatgaatggttatgaggttcccaagctggtttccaaatgcctctttggcccatacagtaggtgaaatgtgcaacgcgtgtgcctgtgtcggaaggcccgcccagcatcctctggctccaggtgccccagcgtgtgcagcatgaggggggctgtgtgcgtgtgtgaacctgtgcgcctgggtcatctctgcatttgtctaggtatatctctgtgtgtgcatctatgtgtgtttgtatctgtgtgtctgtgtgtgtgtgtgtgtgtgtgtgtgtgtgtgtgtgtgtggggtctgcatgactgtgagagactcctgaggccacagtggcaggtagacattctctggtaaatacattccccattctagtggcacggggcctgggctggagacttaggggcatcagctgggagggggagcctggcacagcagccgttcctaggagtgagcacaagccactctgaagtgtggtctgaagccagagtctaggtttcctaagaacatatggcttgcctttctttctgatcaagcacataataatttttaaatgatcatttattgagtacctgccacgtgccaggccctatgttaaacacttgactcagattccctcctatcttaaaatagacttatgaaatagggactctttctcaccccgctttacaacttgggaaactgaggcccgaatctctcagtgacagagccagggtttgaggcagggactgctggaggcagggcccatggttctgagatgtgctgctcagaaccctgggctcttctccctccctcggccccctccacaaatggtttgtttttgttgggacagacgatgaggagaaaggcggccctgtgggaaatctgagagcagcgagctcccttcctgctgaattggttggggtggtgggggacgagctccaacagccgctcccaagccctgaagaccctttgggggacctcctggttttgacccaagagggagctggtttaggaagtggggttgggggactgtggccatggacggtgtggggagagggtggtcacaggccagacaaggactcagcccccctgattcctgtggttcactgatagcctaggccctcaccaaccccttcaccttggggatctggggcaggtgagcctgcagacccacagcaggtgtatgttctgccctcggagctcctgcaaacagcctttccactgacgcagtgccttgggggctctgccaagcgacccctagaatggggattgtggggggtcgctctaggcaccgcagcactgtgctggggatgttgcagctgcctgggagtgacttcacacagtcctctctgcctccagggtcacccggaacggggttgcgggggacaagctgtgggcgggggggacgggcagcaagatacaacgcatgaactctgacctcgtctctttgagaaatcagacacatctatatacgcatggaacactcaatgacccctgggtgggtggtcgaggagaaggggacggtgttttgggggaggagagatgttgggttgaaggactgggagagaggagctgagtgggccctgtgggagagggtgggagccaggggtgtcattccgggacagcagccgggcctggaatgatgcagctgggagaggtgggggcacggccagagcagtgggcggaggctgcgttgtagccagccctggtgagaccaggccagagcgtatattttaccacgtgtgcaaatctttggcatcaccggatttttaaaaataatagctttaagatataattcacattccatacagttcacccatataagtgtacagttcgatggttttagtacattcacaatcaactttttaaaattgtcatgaggtgtcataggttttcatagagggagccatgtgtgggcaatccttgctgatagggtggggtgggaggtagagatgccagaggcaggtggacccgctccagggcatctaccaggttattgtgccacagacacaagaggtacaaagggcctggagggaatagggggacgagagaagcccaaggaccaggtacctgctggatgtgaggacccaggggaaaggtgggacctgagttttctccagggtttgggacttaggcagctgaagggaggggaatgttacttccacatagagggaaaaaccagaaaatagagccggctctgaaagaagcatgttctggaagagtaggattttagggactgcaagtcatccagttgggatgaaaataaatagagctggagcccctggcagtaggaggcgtatgttaacttatgcccaggtgtcttagaggaagagcatttagagagaagctgaaggtagaacatgacctttgaggagcacccaccgtgcagaagtgggatcaagactcccggacagccccagagacaaagctgcagaatctgaggctggagacccagaagcaaggagccagatggagtcatggctgggagagaacacacagaaggcagttgctggtgagctccagaagcaggggtctcctttcactccagggcccggctccacaatggcactcaagaaatggctgttgagtgagtgcttgaagcagggagtgattagctggccaggatgttgaattgagctcaagggccatgaggatggaaaaaagccctttggggccgcgggtgactgtatcagtcagggtccattcagaagacagaaaccacatggtgattggaacaaggaaagtttcacataacgaattattaactctaattggattggaataatgaggaattggctagtaagaagtaaaaataactccaaagaatacaaaaataatagatatgagaacagcccctacctctagggttgccacagagtgcccaaggaagaggccccgcagggttgagatccacaccttgatggagagggtgtggcgatggctccctggatggcaacgtctctgtaatgccatgttggcagaacttgctggaaatccaccctctggaatttactggaaatccatctttttgggtcccaaggaaagttgtttgtgggaggtatcttgctggaagcacaccgctgctacgttttcccaggggagtgctgggagaagctcctggctgttgggtactcctgactgacgtgttgctggagccaggtgctggagaagctgtctgcattgcaacagcctggcactcctgcaggagctgggcactggaaagctgcatgctggagaagctgcagcagcacaggagctgggtgctgggaagcttcatatctggcaagaccctgatgctgggaagcgcccatgcagcaagatctggctgctagagaagttgtatacaatgcaggaacccaacaagagcacactgggtctagaaaggaaacccacctcctccttcaatgcctcttcagtgccctccacagttgtgccagctgacaaaggaaaagtagttaaagggcccagctccatcttcacagcacaggcaatgatgggcgaataaactgataactggcacagtttacccctttggctgcacagcttccatttgcacctttctacaacatctgaactcccatacaaaaacaaacaactggatgtctacctatcaagatagttatccttcttatgaaattctcacccttttgcccagagagccccaaccatcattctaccaatccctggctacaataacttctcaaagtcagtcacagtctcactgaatattctgttacctaaagactacattataaagctaactgtcaacaacttgtatagaaaagaatgggaaggagaaaaaaagaagaaaatggttaccatattgcaaacacaccacacacacacacacacacacacacacacacacacacacacacatatatatcaagttaatagaaaatgtgcaaaaccactagaggcctggtttctgcatttgttcacaaggctacactttacacttgctacctggcttcattgtcttcttatcccattctgtgtttcctccacactcagccagagccttagcaggtcatgcttcttttacttggtggagtaacccaaaccctcattcccaaaggacctgaatccttagttatcccgcttttgttgttgttaccataactttccattcagccttcctttgggcatggacgttcttaagaggtgcctgagagaattcgctgggttccagacacagtcttgcttggctctgtggctgatcagcaatccagttttctccttggtaactaggatcaatcactccagacagtggcataactccttttttccactgtcagttcagtggcgtaaggagttcgagaaagccaagtgggtgtgtgtgtcttctctcccagggaaagcattataatatgtccctggtgggagcactctcccccgaggacgaggtcagcatccccagaaggttttagagttgtggggtggggaaacagggccacgcgcaggggactaagtgatagaggctctggagctggcagctgtggaccatgctgtagagaaggttggaaaagtagagaaacatgcagatgaccgtgggccgcttccgctgtggatgataaaatcagacccatgctggtcactgccagaccccatccaggaccatgtgtctgattctcacatggactctgtgccaccctgtgcccctgactcccaggccgtgggaagcccatctgacccacagcacgtgtgacccctagacagggcttctcctggcttgcagcacttggaaatcggtgctgccttacggaagtctgtgttggctcattttggctcctgagaacaacttcagctccttaacagcatctattttaggtataaatcccccccccgctcacttttggggctgtgtcatggcaaccattagtgtgagcaaagcagtctgactcagactcccatgtggccgccgtagtggcagcaggtttggtgtgatcataagtgctcctgctggtggtgccagtgctggtggtgccagtgctggtggtgccatggcctcgagagtggtgtgagagccacaagccgtcttattgtgactctagagccagataaatcagctttgcagagggcaggactgctggcctgtcaccagtggcttttggtattctatggacagctggtagtttgggtgcaagtaatgtttctgaaagtcagggcaatggaatggtgatggccatctcactggaaaatggcaccaagacccccctccctctccctcctccttatccatccccagtcttatgaccaagagaggttgtgacaggagggggaagagttgacagatagacatctccgtctaggaggtctcctccactttctcctggcccctagctgacccctaccctagcagatgattgggcagggggtgggggtggggcacaagatactctgctgccttctgtcacccacatttgcacctcctcctaagctcaaataggaaatttagccatgggactgttatctgtgggccagggtcaccccagaggcacaaacatcgatcatggcgctggctctgagatgtgtgtttagcatgctcattcatgaccaagaactgccacatttgcgaagggttctgagttacacggacctggatttataatcctgccctggggctttctagctgtgctaccctagagaggtattaaacctctttaagcctccatgtcttctataaaatggggataacaataggacctgcttcataggattgttttgaggattgaggatagtgcatgttccttagcacagtgcttggcacatggtaggtgctcaggaaatagctgcatgaatgaatgagtgaatgaccactgcattgggcagggcattgaatactgtgattagcatgctccagtgccctccttccccgctcccactgcagacaagcctgaccaggagagagagactgactggaaactttgttttctggccagtccgtgcccaaagttaatatagatctgcagcagtcacatgctgattgtgagagagggagtggagagctgtgagcttctgagtggggtggacctggactgtgcctggctccaccccttacccactgtgtgaccttgggcagttttattaatctctccatacctcattattctcatctggaaaatggggataaaaatagtacccacttcaaagggttggggtgaggtgtgaggattaatgagatgttgacattgtaaagctctgctcacggggcctggcatgtcggaggagcttaagtacaagctcctgcctgagcgaaggccacttagaggaactccagggatttcaagaaaggagagaaatctgcgggctggttgaatctgagagtaatcatcgttaagatttattgagtactttctctgtgccaggcgctcttggaagcatttttagggcattccattttaattttcacagcagcgctgtgaggtggaaagttctttctcccactcgacagctgagaaaactgaggcacagtttcgcctcaggccacacagctggtaagaaataaggccagtgttggaaaccccgcagttggcctcccagggagccctggaggggactgagattagcccttaggtcaggagggtgtcaaccacaagtcatagactcataccaaagtagtgaaagctcacagtccccggaagttcagagacgtccctgcctccaggaacagcaagaccaggggcccagacagtgactacaacgctttatccctctgtcttcatctctgagctcttcgttctcaggcaggctcacccacatggcgggaagacagcagctggcagcccctgactcacatcgaccatgttagcatccttccatcgcatcgataaaaaggttccagggaggcctctgattggctctgcctggtcacgtgctcaccacttgcctggggtgagggttgaggtcagcacaggcacaacgaaaaccttttgacaagcgtttcccaccgggaaggaggggaaggcatctaggtagagcagaacaaccagagtccactagaggaaaaggagaatgcaagcagagggagggagaaggacctgctacagaaatggtcagatatttttcagccattcagacagagaacttgagacggagaagaaggggcccttagggtgagaatattgggatcgtgtttggtggagtgaggatttaggtttgtgggccgtgacagttttggttttggaagaggataattatgtgcaagcccttgttgaggagagactgtggggtggcaggggggccagcagtcctcaatctgaagatggagaggaggcttgggtggtcatctcgggggtgctgatgaggctggggttggtgaggaagtgggggcggcagtggggacagtgtggtgcaggggagcagtcctgaggcttcaggagatggtggagatgtagctctttggtctgagaaggggctgagtgagcgggggttggggttacggatgcaggcagcactgacttgcgctgcccatgggctggacgcagcgggaatgatgtgtttggaggattaaacatttcgtgagggtggggggtggagagggaggtaccagtgttgtagctggtgatggaactctgtgtgggtgtgaggagctgatgatggttattctgtgggacgtgatgatttcatagaacaacagaggtggaaaggcctcagctacactcttatttatagagaaggaaatggaggccaaacgcaaccgatggctgcagttgggacgtaagccctttctcccatccccactctctctgtttaaaaattcatttttatttactcacagtagtacatgcatataatttaagaagtcgaatagtactaaaacctcctaacaaaatgcagtgattccttgcctactcctacccttatcctcttctcagaggcaaccgctttcgattctcttggctgtttcttccagcaattttcatctcatatttctgagtaaagtgcatatttttgattcatctatttagacattttccattgatttcctatttagtagatcctcttacatgtccaacctttctgctcttcagccatcctccttaaatattgacagtactcttcttatattttttcaaaaaattgtttgttgttgattgttttgagacaggatctcgatctttgcccaggctggagtgtggtggcacaatcacagctccctgcagcctcgacctcctgggctcgagcgatcctcccacatcagcctctcgagtagctgggactacaggcatgtgccaccacactcggctaattttgtaaatttttgtagagacaggatctccctgtgtcatcagactggtcccaagtgatcctcctgtcttggcctctcagagtgctgggattacaggcatgagccattgtgtccagcctcaaaaatgttttgtgcatttggtagccagaataatggcccccctaagatggccaggtcctaatcccctggacctgtgaatatgtcaccttacatggcaaaagggactttgcagatgtgattaaattaatgacctagagatgaggggattatcctggattatctgggtgggcccagtgtaatcagaagggtcattagaagtgaaagatggaagcagaagagtagtcagagcaggagatgttgatgaggcagagagtactgtgatgggaaaaagactggccatcgctggctttggagttggaaggggaccacgtggcaaggaatgagggcagcctctagatgttgaaaatgtcaaggaaatggattctccttagagtttccagaaaagaatgcagccctgccaacatcttgagtttagcctagtaaggagaatctttttttttttttactactgacttgcagaattgcaagataatttttttttttgagacggagtttcgcttttgttgcccagggtggagtacaatggtgccatctccgctcaccgcaacctccgcctcccaggttcaagtgattctcctgcctcagccttcccgagtagctgggattacaggaatgcaccatcatgcctggctaatttttgtatttttagtagagacggagtttctccatgttggtcaggctggtcttgaacttccgacctcaggtgatccaccctcctcggcctcccaaagtgctgggattacaggtgtgagccaccgcgcccggccgataatgtgttgttttaaggcattaattttgtggtacatacaaaagtaatttgtgtgtacatacatgcatatatacatatatatgtacacacacatatatttgttaaacctacacacagtgtttattttattatttcgataaaactattattcacagctgagccttgtggtgcactgtaatagtttcttttcgtttttttttccctgaagttaataattaccttgtttctcatctgccttatttttttgtacctgttgctaattcctaccacaacttctaatataattttatttttctttaacaatactgttaccttaggacttctttttctttttttctttttaactgacacataataattgtgcatctctatggggtacaatgtgatgtttcaatacatgcatacattgtgtaatgatcaaaacaggatagttggtatatccatcacctccagcatttatcacttctttgtggtgggcctaccacactttccaatagccatcagtattgctttccacacgggcagtcacagcaggtaaaagatgtttcagttccattttttaagttatctatcctctttcactctgggctagttgctttctaggcacattgtagctgatgctctgtgacttccttttgtggtcatctttggaattcccattactttccggttggaatctctgttttctggctttcgtgtcctcctcatgcttggctcactcccctcattagagcacatcttccaggacacacatctgtccatatcaaaatccattcatggctgggcacagtggctcacgcctctaatcccaggactttgggaggccgaggcgggtggatcacctgaggttaggagtttgagaccagcctggccaacatggcaaaatcccatctctactaaaaatgcaaaaattagccgggcatggcggcgggtgcctgtaatcccagctactcgtgaggctgaggcaagagaattgcttgaacccacaaggcagaggttgtggtgagccgagaatgcgccactgcactccagcctgggctagagagcaagggtccatctcaaaaaaaaaaaaaagaaagaaagaaaaaatctattcagttcctgggtttagatagcagagtatggccacgagcgatacctgtgtagttttgtcaggtaaaaagacagttcgacagcagagggcatggtgatgacggcactcgtgccccagtctcagtgggaaggctggccctctctggctcatgccaggtgactggcatgcggcctcttttccccttcatcctggagcctcccttcccatctctcctgtactggatcttatgcgtattagaggacatcttcctgtccttcctgggaaaggagcgtgaggcctcatatgtctgaagatgtctttactagggcccagcacggtggcttacgcctgtaatcccagcactttgggatgctgaggtgggaggatcacttgagcccaggagttcaagatcagcctgggcaacatagtgagaccccatctctatttaagaaaaaaaaaagaccccgggcgtggtggctcatgcctgtaatcccagcactttgggaggctaaggcgggcggatcaccaggtcaggagctcgagaccatcctggctaacatggtgaaaccccgtctctactagaaatacaaaaaattagccgggtgtggtggtgggcacctgtagtaccagctacttgggaggctgaggcaggagaatggcatgaacccgggaggtggaggttgcagtgagccgagatcccaccactgtactccagcctgggcgacagagcaagactccgtctcaaaaaaaaaaaaaaagaaagaaagaaaagaaaagggccaggcgtggtggctcacacctgtaatcctaacactttgggaggccgaggcaggcagatcacgaggtcaggagattgagaccatcctggctaacacggtgaaaccctgtctctactaaaaatagaaaaaaaattagtcaggcatggtggtgggcgcctgtagtcccggctacttgggaggctgaggctggagaatggcatgaacccctgaggcagagcttgcagtgagccgagattgcaccactgcactctagcctgggcgacagagcgagactccatctcaaaaaaaaaaaaaaaaagaaaagaaaaaagaaaatgtctttattttactctcacacttaaatgataatttggctgaaaataattctaattggaagattgtttaagatttggtttattctttaagaattttggctgggcacggtggctcacacctgtaattccagcactttgggaggccaaggtgggtggatcacttgaggtcaggagttcaagaccagcctggccaacatggcgaaagctgtctctactaaaaatacaagaattagccgggagtggtgacgggcgcctgtggtcccagctactcgggaggctgagaaatgagaatcacttgaacccaggaggcggaggttgcagtgagtggagatcatgccacttcactccagcctgggcaacagagaaagactccgtctcagaaaacaaaaacaaacaaaaaaacccaactgatcggaagctctgagaatgatagtggacttgttggttttcaagtctacataggctgacctgaataagtcattttgaccccattttggtactgatgttggtattggcatccttaaacctttcctcttagactcattcgattctccagagaaggaaatggttgtctggctgccagtattcttagagcccaatcggggaatagcctgagagactggacatcagcatttaaaataaccttcccggccggcgcggtggctcatgcctgtaatcccagcactttgggaggctgacgtgggcagatcacctgagattgggagttcgagaccagcctgaccaacatggagaaaccccatctctactaaaagtacaaaattagccaggcttggtggtacatgcctgtaatcccagctactcgggaggctgaggcaggagaatcgcttgaacccgcgaggcggaggttgcggtgagccgagatcgcggcattgcactccagcctgggcaacaggagtgaaactccatctcagaaaataaataaataaataaccttcctctccttggtttgatatatcatctttgtcttcagctgtgccaagtgactctgtgcaaagaccccctattttatgccctccagtgactacagataaaccttcaaacttgtagaagagggtctaggaattcactactctcactcagcctctcgtttctcacacaagcatcctcttcagccctagtgccagagtacctggtgctgtcatataagcatctgttgaagactgtgttatatatcagcgttcacacgcctgtctgaaatttggctgtcacaagtctgctttccagattccacaattttgttggtggtattccttctcttgttcagcctaatcttgtgattttatgtcttaaaaaatcttttggccaggtgtggtggctcatgcttggaatcccaacactttgggaggctgaggtgggaggatcctttgaagccatgtgttcaagaccagcctgggcaacatagggagaccctgtttctacaaaaaaaaaaaaaaaaagccaggtgtggtggtacatggctgtagtcccacctactcaggaggatgaggtgggaggatcacttgcacttgagcccaggagtttgaggctgcattgagctatgatactaccactgcatccagcctgggtgacagagcaagaacctgctctaaacaaacaaacaaaaaatgtttctattgcattgagtttagaaggtagtgagccttggtatgcatattcaaagctttcagttctttttccacaacagttttatagttgacgcagtggagatggtgatcatatcagctgtgatacgaagatgttttcatggtgggattccttgaaattttttaagtggctgttaacaaacattattcatggtcactgtggactctaaaaggaggaaataaaagctgcttttcatggtggtagggttcttggcaagggttttttggtggcagtggtggtggctgtgcagcccttggcccaggtgggaagaacgctttggtatcggaagcagccagggctgtgcggtggaaggaccgatgtggtggacacccgctgctgtgttgggactgtgggcccaggagagcccactccccatggctgggctgcctgaaggaagaatgaagcgtctacgggtaggtgggcaatgctatgtcaaggtctgggaccttggccaccaactggggccccctagggttgtgtagtacatggcccgcccagacacatactggaggattttaggtgatggacacgattttgagggactgctactgacagggctggtccattgagcaacacgaaagggttgacccaggtcagctgcattttctgtgaggacagtttctgcagctcagatgtcagagtcttgggtggaggaaggggaggaggaagagaatcttcctttcctttcctgtctggggtgtctgcccttggggccaatgccctgtgaagttctgcttttccctccagcttccttcctctccagagcttctctgaacctcgccacacccgtggcggcacagatgccctctgggtgtccctaagcctagggcagcatcaagacaaccctcccgccccgcttcctttgtgcctgggtctcccccgactccatttggggtgccctgtccttgtcagccccttgtgtgtccactgtgcctgtggggccgcaacagcttccttggccggtcagagctattaatagaaggggtcctgctctcccatttcattggtggggaaactgagggccggggaagcctccgtcaggagtagatcccacccctgcggactttgggctcaacgttctttccaatcagactctgcccctcttagcttctgaccctttcgaaggtttttgttttagtgtggctggagatgtctgtggtaacaaatggggagtgaggcttgacagggaatcactggctgctaagggctggcagccgagtgcttctgggttggaccagttctcttttgggatcttcagagttgcttctgtggtgtgtgttgggggacgtgaacccaacccctcagaactttagtgtcagagagatctgggttcatgcctctgatgggtcctggccttgttgatcttaccgtcacctgtaaactgggcacggcacagcagctgcccagatgcagagcacgagccaggccctgagtggcatgtggccgatggagctgctctccgctgccgtccaccctctcgggacccgggcagcaaaccttccttaagcccagcactgcgctgtgcctaggggtatggggaatggacgcagtgcacctgggctgcctcagggctcagctgtggggcaggtccgcttcaagcctttctgggttgacctgatggagctcttcctgtcctggccctaagaagctcctcctgccagctccttcctcccactaccccctggggcacagccagggctggggcacccactcccaggcaagaatgcacccctggagaaaggggctaggcctgtaggagagccaagcctgtgctttctcccggtcctggttttccagggagccctgactggagggggatgggaggagaagcccaggagggagggggagctggggaagcagaaccaggaactggaaggggaagggtgtgggtgggcccagatccagcctgcctcccgctctcccttgcctgccaatcccctcctgggccctggcacactcaaggcaggggcttggcggccgcctcctccgggggtggggagcaggggagctcttgtgtgtctctgagtgagggggctgagacagcaacacccccaccccagctgtggcctgagctgcaggctttgttatttctctggcttgaggcctacacctggagcagagggaagaaaagcccctaaactcagccgtgtgggttcagaggacccctcaagcccaccaactctgcaggcaaatgaggctggttcatggggtgggggagagagcagcctcactcctgcctcagtgtggccgtggcctgtggccttggccgtggccgtggcctctccctcctaggccagagccaaccaggcctgcagcctgagctcagacctcagctttctctgggcccaggcaccggtcctgaagtgaggtgacattcatttcactacatcctgtgactgcactcacttcctccacgtggcgggaggtgtgggggtgggggtgaggacagattagaaggaaaacgtagctgggctaggggcctctgggggaggctgggatttcccaggggctggttggggtgggagggaggatgcgggaagctttcaaaggagagagaggctgtgaatgaagagaagggaggaggcggaggcagctggaggtcccagaagtggcacccattggccgcagcgacacggaggggagactgctgccactccaaggctctcagaggctgctggggtaggaggtggccctgaagggagcctgcctcggtttctctgctctctggggtgctggtgaggccagaaggaggagcaacaccccaggcctcacaggccaggtgtggccctgggctgagggcctgacccagggagggtggggtgctccgccccactgatcctcttctctcccccacaggtggagccatcgaagcccccacccacaggctgacagaggcaccgttcaccagagggctcaacaccgggatctatgtttaagttttaactctcgcctccaaagaccacgataattccttccccaaagcccagcagccccccagccccgcgcagccccagcctgcctcccggcgcccagatgcccgccatgccctccagcggccccggggacaccagcagctctgctgcggagcgggaggaggaccgaaaggtgagcagcgggctctgctggggaccctctggcctgggagagggagagccctgtccctatgtgatgacagccggctcctcatactgagtgcatgaccgcatcactcagtgctcacgacagggtgtgggaccatcacatccctgtttgggtgatgaggaaacggaggcttgcagaggttcaattctggtgatggagcaggcatttggttccaggacccaggcttttaaccaccatggcattcgcacagtggctcaaagcccaggtctgtgccattgtgagggttcggcctcacagagagtcccagaacctggattccttctcggacccgcctcttactagccgtgggccttcacgtgaatcactttctctctcagctgcctctgtttccttaaggtgttcagtagcttctaggggaccaaagacaagttctggggtggggcacggcagacacgaggccgcgggggcccaccctcccacacagacggaggcacaggctgggctcagtgtggcgccagcacactttggagatggtgatttcctgtccccgccccccaccccagactccaggtgaatgtcgctgggttatctttggtatggcttttggccacggagctggtgacctccatgttttcagaatctagttgggggtggcctctccacccttctgctgaactccaggttgtgcctgaatcagtcagaggagattacatcagactgatgggagtccctgctgggtctccacaggctgtcttgggaccttaccaagctgtgtccccatgataggaaaagctgccccttaacccccagcactggactgtgttgccctctgtcagtggaatggtgaactcactgccaccctccaggggatcttatgatggccataggccttcctggcatgtctgtctgctgtgcctctgtccacagttccccctgcctgctccccttcccctgagtagcgctgggggttgtgctgcttggtggtgtctgggagtagctgggcatgctcatgggggcaccagttggttcttttggaacaaaggtggacacctggcaccagctttgggggccctgggcactctggggctagaggcagccagcaccctacctgaagggtgtcagctctgagacctccctcttgcgtgctcagctccttcctgggtttaccattcttcagagtgtgtttctgtttcctagttttccatcaatggttctatttggtccttggggacaactcttgaaacaaatggggcagggacagatggccccagtttacagatgaggaagctgagccccgctgggcagtggcaggtccagatgacagcctgttctcctgtctcccaggtccgagcccttcccacagccctacctgcataggtcctgctagggacacatgtacacatcccaggagtgcacatgacgcccagggacctgccttcccagcccagcaccctgtagagcaccgtgggggtgtgtgcacccagtcagccagagcaggtcagaaagccagcatgcgctgcggcccactgggcaggacgcccggggcgaccgatcaggctcctcccttctgaatccatgggaaaagaactgatagtcctggatacctgcgggcccctaggctgcccccgctcaggactcaagcagcatgaagacccaagccctttggccgtagagttggggacacctgccgctgtctgtgctctggagtggcaactgtggccatggctgactccctccccttcttgggcctggcttgctttctctgtcggataaggtgaccccgagtgtcgccccactctgggtccgatgtcctgacagttgctgacgcagctccccatcaatgcactggcagtcactggtcagctgctccccacaggtggggagggtggggacagctgggacaaactcctcctgttactggactgtactcccacgccgctgctgctgctctgggctgcggagccccaggccaccaccaatggacgggagcaggtcaggatctgcattataatagctcaggactgagaagcaacgctggaccaggagtcagaaatcccaggtcctagtcctgagtatgccacttactggagatgtgacttcaggccatctgggcttgtgtttgctcagctggaaaatggggatagtgactccagccttgcctgttttaaagggtggttgtggaagtcagataaggtcatgggcatggaagtgacctgcagacagcaaagtctggtccaattatgagggattacgattgctattattatctacccatagtaactgctctggctcaagcggcaacaaacacacacccagccctagatcccggtgctgatagagtgcacactcacaccccagcaggaggggtcatgccaaaagatggcagtgatctggatagataagggctgggccatagccaggcctcctccccagccgcccacacctacaccacgcatgctggctcacctggcacacttccccggcacctctgggctggctccagcacctccagggagccgcccagggagggtggggagagacactgacagccaccacagcagcccatgaaagccaggcctgcggcaggggtgctggtagctgcagaggggaagacacaggcttggtctgcagcccagggagcctggcacaggtgccaggggcactgtgcacaaaggaactgtttggcaagccagatggaaggggtgtggccaaccaatggcccttccactgcctggccccatgtggccctctagcctctgcccaccgccgccccccctccccgcccccgcccccagccccgcctccatgcacctttcactccagccccactcccatacttcctggagtctccaggtctttgtttatgctgctccctctgccgcatgggccctttccctaatctcttctcctccctggtcaaagcctcaaagcccaggctgtagttggccttgtattatagtttgcaggggaccagtggttctcaaagtgggatccccaaatgagcaacttcagcatcacctgggaaggcaaagctcaggccccattccagacctgctgagccagaactcgggggatgggacccagccgggcacctttaaccatccctccaggggatactgttgcgcacagatgttgagaactattggtgtagataacttctgcccactgctagcctggagcgcagggtcacggcccttttcttccatgtgaatcccccggacctggaatagcacagagtgggtgcttgggaaatattttacggatagaacggaaagaaaaatgagagtagccaagaccctcccacaggagaataatcccggagcccaggatcagggaggcggagtgcagagctgtgggtgctgggctgaggcagccatgctgtggctgggagtgtacagagtggcctgtgtgtgtccccctggcacctgccgcctgccctacccgccatccatatggtgggcagagcagggctgcttggggagatggggaggaggcaggccgagctctggggctgtggtcagggcgagtcagctggtaaatgttgccgcagcagagggagggggctggcctcatggagggtgggtggggaggcaagcagtggggaggctgagagcttagaggggagtatggagcagagggtggggggcagagggagcaggacaggggaccaagaacagtccaagggccacctcagatccccaaatatgaatcagaggggagtccacagccccaggccaggcccctgttctcagttctgtcccctttcctctggcctcagaaacacaatggctaagatgcattgaacgccgactgccgggtgctatgtgcatgcattatcttattccattctttttttgtttgagacggagtcttgctctgttgcccaggctggagtgcagtggcgtgatcttgtttcactgcaagctctgcctcccgggttcacgccattctcctgcctcagcctcctgagtagctgggactacaggcgcccgccatgcccagctaattttttgtatttttttttttagtagagacggggtttcaccatgttagccagcatggtctcgatctcctgacctcatgatccacccgcctcggcctctcaaagtgctgggattacaggcgtgagccaccacgccgggcctatcttatttaattcttacaattgccgcataaggtagacactattattttcatcattctatcttattaagggctaaactgaagctcagagaggttaagtcacttgcctagagtcacacagcttgttaagtgctagtgctgaggctggaatgaggctggcttctgcgctccttaggctgtctcctgcgtgaagggggatggagtgaacagtgccccccggtggtgatgtgatgagaattcgtagtcctcccctggacttttgctgcaggagaaagcctttcactgcataatggcgctcttgcccttggggagaagttgggggcacttcatctccagcaagaactgcacacaccacctgcgtgtacaggcacacacaccagatggaggcactgctgcagacatgcagcttcttaccatttcttcctgcctcctgccctccttccttccctgcctctccctccctggacatacagctcctcttttcttctcttcctccctccctttcttcagacataggtacctttccaggtagttagcatgtagcagggctccgcaaggctgttggatgaactgagtgaccgtgcttggagggcctagtagaggggtaggaagacatcgaggtgggtaagccatgcctgccccccaggggtgggtgaggcctgctgggcagctcctctgatcaagccttctcctgcctgtagtagaagctgcagctggggtgcatctttgtgctggggaaacacagcacttatgtgtttgcacatgtgcgtgcgtgtgtgtgtgtgtgtgtgtgtgtgtgtgtgtatgcatctgtgggcagcattggggctgcggttcctcctttcccctccccatcaaagtctggcccagaggcctggcagccactgatttctcgtgggctctctccactctggtctgcaagtacaagggcctccatccttgggtggggtccctgccagttccagtggcagtcattcttgctgcccgcggtctgtcacctgctcctgggcatgttctgcctttcttgcactcagatgcccccacatggtcacttagggctggctctttgcttgacagtggttgcggtaaggtcatttcaaagagcatccttcttagtatgtttaaatagctatagaaaagccgctgcaccctcacctcttcagagacccagccagcgataatggcgcgctcactctgatctcgggggagttaggagagggttgggcgtgcttagcaggtttgtgatgtaaacagtgcccatccctgagctgagcaggacctacattttgggcttcggtttctctaaaattctcttaaattggacattattacatgtcaaatgtagttaatcttggtcagtacagtcttggatgggggttgtttggcccctgcagaagggcctgtgttgaagctggactctgtcacgtgacttggaaacatggctgtgagcaggaaaacagctcctagttggcttgagaggttcagacgagatggtgtgtgcaagtggttaacaccaggacatagcatatgttaagttagctttataatttattttggatatctacctacccatccacccacccacctacctgcctacctacctacctacctacacctttgtggtttacacccactgccgccccatgaattgcaggggcgtgggagaagagtaggaaaccatgggtggggacagagtgtgggcttagagtccactgagagcctagcacgtgaagggaatgttgtctctctttgggtcatcagtcactaaaggcctgagttccctttatcccttgaacaaaagtaaaacaaggcaagtggtgatgagacctaactcctgatggcaggggctgtagatcccttcaggggcctaggtgaggggccacagtcacttgggtccctcctgctcttaatggccgggttagggatggagcccagccctgctgataaggtgagtcgcccagggccagggcaggaaaggccaggctcagctgtgcagaatagaagaatgggccaggcgcagtggctcacacctgaatcccagcactgtgggaggccaaggcagatggatcacttgaggtcaggagttggagaccagcctggccaacatggcaaaaccccgtctctactaaaaatacaaaaattagcccagcgtggtggtgcgtgcctgtaatcacagctacttgggaagctgaggtgggagaattacttgaacctggtaggtggaggttgcagtgagccaagatctcgccattgcactccagcctgggtggcaagagcaaaactccatctcaaaaaaaaaaaaaaaaaaaaaaagctgcggtgtgtggtggctcatgcctgtaatcctagcccttcgggaggctgaggtgggcaggtcacctgaggtcaggagttcaaggccaacatggtgaaaccctggctgggaaaaaaaaaagaaaaagaatagagctgagtggtggagcagtgtcccaggataattgggaaatgagcctttcctctctggtacctgggcttggcacaggagtcctggtcataccctgcagctgcctctgcagagagccacagggcattagggatattccttgtaatcatcccacgtaatgtttgtgctgcatggaagggcatgtaaaggagtgttctctgcacggtaattgactcattctgtcatcatgattagttagggggcgcccagagcaggatgatggtcagaggttcctcatccccattttaccgatgaggaactggggcttagagaggccacacggctacaaagtagttttatctggatcttcccctctattaagcaagggctggcagagctgggtgtgctactgaaggagcagacatgtgtgggcttggtgccatggaagtggccacaggcagagcagtagcacactccagtctgggctcagcatggcatcaggtacttgtttacatgttgttgtctccctctgaaccgagtttcctatttgtttatctttgtatccagtacacagtaggtgctcaatagatttttttagtgcacccctgtgtctggccttgtgacatagagacctcagaggtggacagggctgaggtgtgctgctcgtgggtgtgaggtctggcccaccctgcacctccagaagacaatgaggccccagccaggtggacaggctgtggacaaggggctgcagccctggcacgagggcctgggaaccagatgggcaccaccgttgtcagctatttagcatttctggaacacctctgtgtgcaagtacccaggagctgtgggggactcagaggcgccaatgagacacggcccctcccctccaggagagtggcctttcaggaggatggaaggctttcctcggtaattatgacacgacctaagcagtcaatggttacttgtcggatattgttgaataattgaaataaagggctgatgagccttgggaggtgactgagatcagaaaaagtagggggctttggagggctctgggcccatgcgcatctacagtgattcccagcccactgcctgacccctcacgctgggatcagcctctgcaggttggcctgggcacgggtgtgtgtgcaagcatatgtgagtgtctgtgtggcattggggtacgcaagcgtgtggctgtagctctgcagagcctggtgctcaggcaacccaggacagggctctgcctcttgcagaagccaattcgtttcactgaattccatgaccacagacagtccctgggaggccagccagccagctggcaaaggctgggcatgcttcttgtcccagggggcccgggcaagtagctggctagatccggcaagttcatcccctcgactcaagcaccaactcgagacatctgctcaaccgatgctgggtcagtagcatccggtttaagtactgaagggaatacacgtatgtcaggctggctgtctctaggtgagggcctcaagagacataaatctcttgtggggaggggtcctgtgtctgggcacagccagcccagagtgtctgtgcctgtgaatgccagtgtgccttgaccttggattgcctgtatctttatggtgtcactgtgtgtgtgcctgttgacatggtagggtatagtggcatgttgcagtagaaagaccgatggactggtaaacaaaagatgtaaattttggttctaaaggcctcctttcctggctctctgatccctgcaagtcagataatctctctgagcttcaggtgtttcatctgtgtaacagaaaaaaataataccagctctgctttctgtaaagtgtaagaatacaatgaaataacatatgtgaagatgctttgttaattaccacgttcagtgcaaatgtgagagattattatcgtcatagcccagcgcatcagaatgagacgttgtatatggcttaaaataatccatccagtgagcagtgttgaaatgtaggtcagatcgtagcctcagatgtttagagagaggaaccacctaatctcacaggccaccaaatgtgaaggtgctttgaaagctgcaaagaatgacataaatgcaaagtgacaattatgtttaagtctagaagggacgttttagtcctcttgtttcctaatctggaatcgtaaagatccgagaggcactggaacctcgtacacagttgtatttgtacgggtttgtagatttgtacgtgtgtctctgtttgcgtctatggactcacgtcaggcacctactctgtgacagtcattcatcaagtgcctgccttggactaaatgcatccgtctaggcattctggatgccagcatgaatcagacacccacacttccctcaaggagctgaccgttgccttgctgggtaggggaactataggagaggaagggtctttcagctcagtctaggcaggggatgggaggagggggcctaggggcagggaatccaggataggaggctggaaaagcgagtaacagtttgctgataaacctgaggggaaggtggtgtggtcagaagaacagtctatgcctaggggctgaggccggaagcagtttgctttcgcgcttggtgctgtctgttgggaccacagtgtggagaagagaccaaggcgatccagccaaatcctggggaccgccctgcacatgagctgaggagcttggctggatcctcctggcccccgggaacccccgtggcaaaggtttaagctctgcagagtggcataatcagctttgcattttggaaagctcctagagccccagtattgccacatatcttgcggcaagagcgcccgccagatgttgggctctgtgtgatagtgagggatcgctgcatatggtgggcggcgtgctgggatttgcacgaggcagggagagggggatggggaggatggagtgggagtgaagtacgaatcaggatgtgtggagcgggggaaggtagcagttctcgagtgactatcacgtgtcagcttttgctacatcacctcatttaattcttataacatcactgtgaagtagatatcatcccattttatagatgaggaaagcaagactcagggaggttaaagagcttgaggttactcctaagcaaagagcagagcgaaactcccagcccggctctgccctctccaaagcctacgtgtctggaatttccaccccctcccctctgcgctggaagtgtggacgaattcagtcccctggcttgacagatgaggaaaccaacctgggctcaaatctgttcccgcgaactgtgttactgttcttcagctgtcccatgtcaccacggatcagattcttttctttcagagtattagcaacgcctcctaattcagggctacttgcagatttgataagcatgttttacattcctttgctcaacccatcagcaaagatatggaataaaacagaccccgtgacagatgcgagaatgaaccacttgctacgcttccttggagccattgaggggcacggcccaagccatctgctcacccttcttggcgtgttagccccctccctccgcagagggaacctcaggcaggcccagagcagaagcatcgcttcccgctttgccctaagactccatcgcggaagagttggcagaagagaacatgcttttcacaacgctgctcttagggccaaatgtcaaggggaagggccaggagttgttcagacctggctctcgtggagactccaagcacgacccagaagcatgcggggcctgaatgctgggccagccgtaaagctccttgcaccaggtgtggggtacacacagcacccctgcctggcactccccgccctctctggacctgtcaggacctggagaggtggcctggcaccggggggtccaccccttcctcctgggctgggttgcacggaattgaatccaacagggaaaaaaatgtgccgagcacctacaggccctgcacacgtggtgtaggtgagagatgccagcaggactgcatatggcagaggggtggcctgtcggggcccccaaaggctttctccgcatgcccagtggaagctggtgcccatcgtgaaatgtcaagcgtctttatttttaggtcattgctgtgtggtaactgtggttccctttcactgatcagacgctctggttggctttcacatctctgattagttcagaataaaagaaagtcaaatgactccctctgtcacaaatgcagcttgttaaagaaatagtttaaagcccagaatttatgggcagtaggagtttttccagaatctgccctaggcgctggggattcagcagtaaacaaaacagacaaaggggcagaccctttgtgaagctgtcttctcaaaacctgagaagcagacaggatggacacctccctacccccattttatggatgaggaaactgaggctccgagaggctgctcctgtaactaggaaatggacaagctgggctcatgcccactttgctttttccatgacctcacatgacccctaatgattttacaagtgctgatcaagacggtgcccatttggcactggttgaatcggattagaagccccacctcagcctgaaattcttagcagttgtgtagatccaatcagaaccttcacaaatactaagctgcactggcaatacgtcctctctgtgtgatcctttcttacactcgggggtctggggtcttcagaagatggttcagaagcagcaggcctcccctcccatggggcgtgtgcccttgggcaccctgagccctcatgaaggctcccgcgagtttgctcctcctcccacagcctttctgccctcaccgcccgtctgctgtgctttcctgaaaagagcccctgaaggatctccggcctcggggctggcctctccctccacagacggcacggggctccccagtcccctggcatcctttccagatgcttcctctgctgtgctccttaaattgccctctttggtccttctccagccctcactgccgtgtcactctgcacagcttagtgacagtgctcttgaaggtcagccattctgacccctagccaagcctcctcatcctcagtatctttctcagacagctttggtctccagtgttggcagccctccccttccttgctcccacaacacaccagggtcctcttctgcacctccgagcattctctctctatctcctgtgtgagctctgcctctctccagcttgactgtggccaccacctatgctaagaccgggcacctctgttcaccctccatgtgcatgtctttggaggcctcccagaacttgagccatgatggtctgccctgcagacatgcctcagctggaggatggatggaggggccagggatgctcttcccgctggtcttatgtctacagctggtcacagtaggtttccatttgtgtgtcccactgtcacctaaaaattaatgtggcaaaccacaaggtattttgcaatcacagaaaatgaaagttgagtaggttgttgagggccatcttactcaggtctccaggagagctgtggaccctcttctacctctgtgctgccagcactgccctgggttggcccctccttggggagggcccaaaagccatctttggctcctgacatcgtgcagggtatgaagagcagcctgtggcccatctgcagggtcaggacgtctttctccccacttccccagcatcatttctgctggggattagtcatgccagagcccagctgagtcagaagggacttgtgggtggtttgtggccaggctggagtagtgaggcaggactttctaggtttatgtctctgtgccccaggagacaagcatgtcagggcccagccgtgcacaggtgttatgtgaggggcggggagtaaaacaaacttctgttccaaactcggtgaatgcaagagatggagaggagctgagattcggtccctgagatcctcctgcaggctgacaggcatgcgcggtgccagctccacatggcaggggtgttcacagctgtacaagtcctccactttccatagttgtccatttcgagtattgcctggacttcaaatagatattgctaaatttaatatttcttttcacttgattttctttttttttttttgagacagtctcgctctgtctcccaggctagagtgcagtggcgtgatcttggctcactgcaacctctgcctcccaggttcaagcaattctcctgcctcagcttccctagtagctgagactacaggcgcgtgccaccatgcccggctaattttttgtatttttagtagagatggggtttcatcgtgttagcaggatggtctcaatctcctgacctcatgatccacctgcctcagcctcccaaagtgctaggatcataggcgtgagccaccatgcccagcgattttattttcaataaaggtgattcattaagtagatcacaaatgtaattgtgtatctgtgaacaaaagctttctcatataaataaacttttaactcaaatcctttatcagagcttgtgttatgattttatggttcggaaaatgtggtcataaagagagagagatgccttccggggggacagcagcgtctgccctgaagttccccaaaggatgtattatttatatatatatatatatatatatatatatatatatatatatatatatatatatatattatattatttagatatataaatatatatctaaatatatatctaaataatatattatttagatatctaaataatatattatttagatatctaaataatatattatttagatatatatatgggtgtgggtatttttatagagatggagtctcactatgttgcccaggctggtctcaaactcctggcctcaagggatcctcctgccttggcttctcaaagtgctgggattacaggcatgagccacggtgcctggccaaggatatattttaagtggggctctgaggggtgcctcaagcctcatcaggcaggaggggagttggtgggggcatattacacagccctggaagtgtggctcgtgggacaggaggaggctggggctggaagggaagccagggccagccccagacaggcctggaatgctacactgctgggatccacctctggcctcacaggctgtgtctgtgcctgcaggacggagaggagcaggaggagccgcgtggcaaggaggagcgccaagagcccagcaccacggcacggaaggtggggcggcctgggaggaagcgcaagcaccccccggtgagtgtcacatcctacacaccctcctgtgcacacacacaacacacacgtgcctggcctgtcgatggcagtgatgtatgtcctgcagggacctggagacatttaagaccaggtgatggggtatacccctccagctgcaggtaccccattcttcaaatcccaccctcacatttccctgttttcttatttatttatttacttttttactgagacggagtctcactctgttgcccaggctggagtgcagtggcgtgatctcggcttactgcaacctccacctcctgggttcaaacagttctcccacctcagcctcccaagtagctgtgattacaggcacgcgccaccattcccggctaatttttgtatttttagtagaggcgagatttcgccatgttggccaggctggtgtcgaactcctgacctcaagtgatccgcccacttcagcctcccaaagtgctgggattacaggcatgagccaccgcgcccggccacatttccctgttttctgcatagagaagtggaggccctgagaagccaggggacttggctggttggtcttgggcctaagacttggaccaggcccctgactcctggcctccctctggaagggaagcaagagggcctgccagaatcccaggctggactaagatctccctggactatctatgaaggcccctccctaccacactctcacccagggtctcagcccccacctggaggaagggaactgaggcctgggagtctgatcaaatgggaagggggagatgcaggctgaggagtctctgtgaggcagcaggagaaccagggccctggggaaggaagtcctgcaggcatgtaggctgcagggccagccccagcgccaggcttctgggaaccagtgccgctgaggcctgggggcagctctggagaacaagacccctgggctgtaggagcctaactggtttatgtcttaaactcagatgtggagcagtcattatttcccagcaccagagacagctggttcctttcttttaccccccttccagctgagaatggtaaacttggagcaagaaggtaagggggagtcagaggctctggatttgttactcagcccttcaaagaaatgttctcagcaggcatggagcccaggacttgctccctttgggtagagagccgggttgaaggtgactgaagtgaaatgggacagtagaggcggggggggtggtgagttcctggaggtggggggtgtgggaacctgctgtgtactgagatgcacccctgccagttctgcctgaagatttgaggcggggggcaggggggcggagtgaagtcattttactggtaagtaattttaaaccttttaatattaaagcaaacgtggatatgtaatgaatgaaattcattctggaatgaaaaattcacgtgatgttgaaaaataacacggggcttcagagaggactttctggctggcagcagactccagattcccagggcccctgcaccctcctctgcccacagggcaccttaatggagaaggtgtgggaggagagccaggccggagtcagagcacactggtgactccacatttgcagcgtgccctgcctctctcctgaggcttggcaacgtgcaatatgctaagcaaactccccctgtccccgtccagtttctgaggacaagagccaccacctgtagcaaataaagacccagcaaccctttgactcatctttgtgagtctctggaatcagagggtagccacatcgctgagaggtggagtgaagcactcgggtgaaaaggtacaaggaagtcagggacaggagtgtggggacatcacctagacaatgacagagaagaggggcacagccgagtgaggggagaggggccggcagtcctacatcccctggcctgaagcacgctccagggcagaaggaaaaacactgtctttggggtccaagagacctgagttcaaattctggctccaccactgaccacctgtgtaaccttgaactgctgctgcctgaacctcaggttccccttctaaaaatagaggagaaaaggatgcatttctccttgcccctgtgagaacgaaatggtgcaagcaccaaggagcctcagcaaaggtcgggcctgcccccgcctggccaaacctttcctcttcaggaggccacggcaaccgtagtttgacagaagagcagcaccttgatttaatgcttcccagcatgtgtccttgagcaagtcacctaacctctctgggctgcttcctcattgggaaaatatggctgccagtaaaacctgccctgtccacctcctggggcacttggcaaacagcaaaagagtccaaatgtgcaggctgggccaggcgcagtggctcatgcctgtaatcccagcaatttaggaagccaaggtgggcggatcacctgaggtcaggagtttgagaccagcctggccaacatggtgaaaccttgtctctacaaaaatacaaaaattagccgggcatgatggcgggtgcctgtaatcccagttactcgggaggctgaggcaagagaatcgcttgaacccggaaggggaaggttgcagtgagccaagattgtgccactgcactccagcctgggcaacagagcgagactctgtctcaaaaaaaaaaaaaaaaaaaaacaatgcagagctggctgtgtaaaaaacctgttccactgcagggcccagtgtccaccaggctggggtgcaggcctatggggtgggggcccagcatcagcctctcagcagccctgggaggcggggcgcatcccgtgcccctcgtggtctggatgtgttctagcccaagtcctaggttacacctgccgtcgcctggcctctcaggagaggcccagggtgaggaggagcatggtaaaggtgaagctgattgggaagtcagctgttgggaaagcaactccttgcacattggaggaaccgagaaagactgaccccgaggacagcagccagcatggcccttcctgggagcccatgttgggggattcctgctgcagccaaggctcagcccttgtggtcgcaggtgctggtcctggcctcttcccctcccatgcaggagcacaggagagatggcttctgaggacctgttgcagctgtggccctgggaatagatttgccagggagctttaaagcagctgagtgtgtcatccagctaagcctggggaaggagcttggctcaggtcctgacaggtgtgacagggatggggactgggaagtaagagatgaaaccctggctggaggctgtgagcttccacagccagcgctggacagggagggtccagatatacccactagtgccctcaccaggtcccacccccaagcccaagaaatcctgggctctctcctccttttgcccccaaggactgtctgtcttggccttcaacaggcatctgtccctgggtgccttctgccccctggcattgccctcacccaaaccagactccacctgccccttgcatgcccaggccagtgtgctcccttcacgacaaacactttccacttcctgagcactgaccatgtgcgggaagccaccagaggaagatgccttctatttcagtcaagtgtgctggagagaggaggccacacataatcacagtaaatgtagcaccggcacgtccttcttcaggaaccccccgggactccattttttaggggacaagatctgaattccagcccctcaccatctgaccactcctttccctgctatgcctgatgccacccctttggccacagaaacctcaccttctcactgctccccaaacacactagccagccattcctcctgcccgccccttacacagttccacagcctgccttctctccgcctgccccagcaccacagcccggtagaacctagcctgaaaatgaagcccagttcagccactgtgacccacactggcctttcccttctccaactgtctccaaagttaataaaaatgaactgataaagacaagttccaagcccaccgatcacacacatgggactgcagtggtctgcagacctcactttgagaagcatttgttgtcacctgtcggtacagaactgagtataactattcagaagcttttatgtgtgtgtgacaatgttgccacatccacgtgctgtgattttatattttacaaccgtatcatttcttggtgcactgagaatttaaaaatctggaaccaaagcttgagctttcatccctgacagtttgaaaatgcaccgccattgcatagtcgctgagctgtgccacactgagtttgcctgcctcactgaggacagagaccagcagtaaaggctcatggttatgcagcatgttactgcctacaaaggcgttttacaggggttaccttatttgatgctgacaaacctgcgtgaggtagttggggaccgctttcattatccccacattcagaagaagagactgaggttcagagaagatgatcaggacttggacttcacacctcccaactgcaaagcctatggtgctctttcctccttatcactgcatccgtgcagtttggctactgggtacctacccaggggttctctgtcagttaatatgtgaattcagggctgctggaaaaagtgtgtggaactggtccaaaaagcatacaaagaaaatggaactgaagagagttattgacacaaataccagggagcctgtgtgtaagtgccgaaggctgcagggggctgagggcaaagaggtgcgcctgcttaaaatcggcaacggcctagttgtctgcagcactggccagagagccaggatgctgcagtcagagccggcaacaggaaacaggaagtcagctgcagggcagggcggggcttaggaagggagctggcacctgggccagggcctgcgggctggccagtgcccatgatagggaggcgggggctggtgcgtggagctgagcccgtgtgtgggtgtgaggtggggaggaaggggcagcctctaaggatgttgcagggtgacaagtgtgggtgtctgaggctggttcctgcctggttgccagcccagacagtcctgcagaggcctttgtccttcatgggtggttccggttggagccctgaagggagagtttctgcctttgcccacaaggccctggggggtgagtggccctgtggggctccatcccctatttactagcgatgcgtatttattcattgacgatttatacccaccaacttcctccagggttatttttgctcagagggagcactctgaggtcacctcctgctaagaataacccagaatgggagggaggaggaggagggggctgggcgctggtgctgagctcagctgagcccaagctggtgttagggctgaccctccaacaccgcaggagtgagccagtccaagagggcaaactgccccacttcagagcagatgacttggggtaacctaaatggggaagtcagggaaccattctgctgcaggcaaaagtcagctaggtacagcttatggcagctcttggaggtttgcagcactggctagctttccagcctgataggacctttgattcttctccaagttaagacagagctcagcagccctgcttgttttcagatcagagccgctcctgggctaaccctccggacctcggctgggtgatatggtgcccctaccttttatgcatataacttcctgacatcgtgtctcccactcctgggctgcagcccttggcccacccctagaggtggcttttcttcctgcgagcctgcatcagtacacgctgctgcccactctgtctcctcatgttttggaaggcatgaggaagacaggccgacacactgcttgtgaggtagagcctatggttatgaaccttgcagctccacccacccactccccgacctgagcggtgaaatcaacgcccgctactggagtgctgcatggaagggcctagcccatggtggggacttaagtgcagtgggactcctaaggatgccggggaagccagggaagatggaggaggtggggcttgacctgggccttagaagggaggtgacatttggagaagtcaaggggaaagtgagaggcacccccgaccccagctgagctgggtgtggaggaaggaaggcatgcagggcagggtgagtgtggggaggcccaaaggcaggggccatgagcacacaggcacaggcctggctgaggggactagggattcattgaaaaatgtatacggggctgggtgcaatggctcacacctgtaatcccaccactttgagaggctgaggcaggtggatcacttgaggccaggaattcgagaccagcctggccaacatggcaaaaccccatctctactaaaaatagaaaaaagccgaatgtggtggcacatacctgtggtcccagctgcccaggaggctgaggcacgagaatcgcttgaacctgggcaggcagaggttgcagtgagccgagattgtgccactgcactccagcctgggctacagagggagactctgtctcaaaaaaataaatttttatatatatatataataaatagtagctgggtatggtggtacacctgtggtcgcagctacttgggaggctaaggcaggaggatctcttgaccccgggaggttgaggctgcagtgagccataattgtgtcactgcactccagctgggtgacagagcaaaaccctgtctcaaagaaagaagaaaaatcttctcaatcttgattggaaaggtagtttgcaggcagcctgaggggcttttactctttatcctctctgaaaaatgtgttatctggaaggttgtgaggaggcggatatgacgtgatgggagtcgtgtttgagaaattggctctggcacccatgagcatggcgttcatccctgagcatgagcacatgctgggagaggggagggggcaggggcgccagcaaagtcccagggcctgtggggggtggcagtggcggggcagaattggccaagcctatgctgctggccctgggaacgctggagaggaaggggtgaaaggaagccctagcaatggcacaacagggacagcatcagcgttgttgtcagagacaaggcttctggaagggagcagatggggaaggggcccctgtcaaggccaccttacatagctggtcttacttggggagcatttaagtagaatctcagaatctcctttttttttttttccaaaaataatccctctgtttattttcatctctccacatcccagggccaccttcagcgagtcattcattcccacaggtcctggccttggtggccttcctggggccccatgagcttttctagggcccgggctccacctgcattgttcctcctgttgcaggtacgcgccggcacacccattggaggagagctgttgacatgggctttctttcatcatccccacctagagaattttgtacattttggttctcctacctcaagaaagacataagcgagttggaaaagctccagagaagggcactaaattgatcaaggggaaggcaaggctgccaagagaggacaggctaaagagattaggactccccagtctgcagagacaaaggcagaggatgtgattaaggctatgaaatcatgtcgggtgcggcgggctgagcacagcacagctggggggcagagggaggacacccattagaaatttcagaaagataaatgaagcacagaaaagatagcaccattttccatggtgggttcccttcttaccaaacctgtcaccctaggattggcagaaattgaaaacagaagcaacttcaaaagagatttacttaacgtatgggatctctcatacgtaatggctttttttgtttttgtttttgtttttgtttttgagacagattctcactctgttgcccaggccggagtgcagtggtgcgatctcggctcactgcaacctttgcctcccgggttcaaacaattctcctgtctcagttttctgagtagctgggattacaggcgtgcaccaccatgcctggctaatttttttttttaagggtcgaagggatttattgaaaatgaaagtacactacacaatgtgagagcaggcctgagcatagggggctcaaaggccattttttttgtatttttagtagagatggggtttcaccatgttggccaggctggtctcgaactcccaacctcagatgatccgcccgcctcggcctcccaaagtgctgggattacaggcgtgagccactgaacccagccagcataatggctttttaaagggagcctccagctcactctgaaatcctttgaggttgacttcaaagagcacaaccaggcccttttccaggtggaccagtgtccccgctggaaacagaaccctgagtgggccggccactcaccacgcatggtcattctggcatccatttgccatggcttgtgacggcctagccaggccatggactgagtgacctctaaggctttgcagagcccagagttctctcctcagacacacgggtggagagatctctggggagaagggagacaggcagctcccagcagatgtggtaaggggaatggtaggacctggagggggtgcccaggctgggaccagagtttccagagtcggccctctgtggcctctggtcccgccatccctgaccccactggctgcgcttttagccaccccacagggaaaagggaaattggaggagtcagggtcctagctccatagcgttggagcttgctccatccaccccaggaaggccgagcaagggggcatctggggaccccctggcccctcctggagtgggcatggagcaggcatctctggctctccctaccacaggccacttccagctgctatcagatctctggtgagggccgccaggggaaagggggctgccggaagggcgggggcgggcagtcatggccccgtgccaatgcttcgggggcagagctgccctgcttacgtggacatgcagctgtttcctgaaactagagtcaacctggaaaaattcaggctggttgaggggtgatgggcctgcagagctgaggaactggaaggagcgaggagttgcggtgggagtggaggggctcactggcgtgtttgtgttggcatcacgcagcttccttgcacccctctgtcctgtggctggcagtgggtgtctgcaggcgtgggggtgcctccttctcaagtctgtgcacgtgacggtgaagagtccgtggctggcctgatgccagggttcccggttggcatggaatggatctcacagaggcattaaaagcaccatggcaggcccggccctctgggtgaccaaggtgaggtcgcccctgcatctgctgggctttgggggagaaggcaagaggagctcccagtgggaaaggaagaggcaggggaggagggagaatggcatctacccaccccccacccccacaggatcccccttccccggtgatcgctgcaggtgggctgcagcctggggacagggcttcttgccccaggtgccagggcctcatctcccctgtgccatgaccttcacctctcctcctcctggattttagtttttctgtgtaaataactatagtaaagcaacacttaaaaaccacttctggccgggcgtggtggctcacgcctgtaatctcagtactttgggaggccgaggtgggtggattacctgaggttgggagttcgagaccagcatggccaacatggcgaaaccccatctctactaaaaatacaaaaattagctggatgtggtggcacacgcctgtaatcccagctactggttgggactgaggcaggagaatcgcttgaacccgggaggcagacgttgtaatgagacgagatcacaccattgcactccagcctggagaacagagtgagactgcgtctcaaaaaaaaaaaaaaaaaatcacttccataaaattagctggatgtggtggcacatgccagtggtcccagctccttgggaggctgagataggaaaatcgttgaatttgaggctgcagggagctatggtcacacccctgcactccagcctgggcagcagagtgagaccttgtctcaaaaaaaaaattttttttaattacttccataaaaataaaaagttaggtgtggtggcaggcacctgtagtccctggtaaaactgaggcgggaagattgcttgagcccaggaattcagggccacagtgagccgtgatcgtgccaccgcactccaacctgagtgacaaagggatatcctgtctcttaaaaaaaagaaagaaaaaatcacctccccatattgggagtttcagacattgccccaccctgggacgcaaggctttgcctggagtgaaggaggggcaggaggtctgggtctggcccagactttgggcaaagggggaagaggaggcggcggcagggctggggaattggttccggctgggcaggccacagcagagggctcctccttgccttgcctctgtcttttgcttgaattgagcgctgctcaggggagggccagcagcctctgcccggcctttcttgggcactgcactgccacctctgccttctccaaaccctgggggcatttgtgagcttgcgcttttctgagactcaacccagagcgggagtcggccttcaaatgcctcgcctgtacctgagccatcctggaagctttactgatcagaggcgtgtgacccaaggcaggcctcagaaaagcgagtatcgctccagctcccctaggatccctgtgaaaattacatttattaattttataagcatatgtatgcccagtcctgtgtgggatgctagagagccataggtggagaggcctacaaagttaaataagattggccgggtgcggtggctcacgcctgtaatcccagcactttgggaggctgaggcggatggatcacctgggatcaggagtttgagaccagcctggccaacatggagaaaccccatctctaaaaatacaaaaattagccaggtgtggtggcaggcacctgtaatcccagctacttgggaggctgaggcaggagagtcgcttgaatccgggaggtggaggttgcagtgagccgagatcgcgccactgcactcgcctgggcaacagagcgagactcggtctcaaaaaaaaaaaaaaaagttaaataaggcaaggctcacagtcgaggagggaggccacagtaaacagataattagattcagaggtatgaattgtaaggagattgggtgagaaagggctttgtaaacaaacgtggcatgcattggctgggacaggagtgacagctgcggtgggttcacccccacccttcagggcaaggctgggccagcagctgtccacacctgccaactacagggggctgaggggtccagatccttccatttaaaggagcattcctttaaaatgctccttagaagacagaaagtagaagagtggtgactgggggagaggcaactgggaagttagtgttgaatggagacagtttccgtttgggatcgtggaaaagttctggagatggatgggggtaaaggttgtataaccatgagagtgtacttaaagtatgcttgaaaatggttaaaatggtaaatgttatgtatgttttaccccaggtttttagaagtttaaaaaagtgtttctaggccgggcacagtggcttacgcctgtaatcccagcactttgggaggctgaggtgggtggatcatgaagtcagaagttcaagaccagcctggccaagatggtgaaatcccatctctactaaaaatacaaaagttagccaggcatggtggcagtcagctgagataacaccactgcactccagcctggacaacagagcgagactccgtctcaaaaaaaaaagtgagcgatcttggctcactgcaagctctgcctcctaggttcacaccattctcctgctgcctccccagcagctgggactacaggcgcctgctaccacgcctggcgaattttttgtatttttagtagattcggggtttcaccatgttagccaggatggtctcaatctgctgacctcatgatccacccgcctcagccgcccaaagtgctgggattacaggcgtaagccaccatgcctggccaaaaaaagtgtttcttaagccaggcatggtggctcatgcctgtaatctcagcactttgggaggctgaggtgggtggatcacctgaggtcaggagtttgaatccagcctggacaacatggtgaaaccccatctttaccaaaaatacaaaaagttagccaagtgtaatagcagacacctgtaatcccagctacttgggaggctgaggcaggagaatcgcttgaacccaggaggtggaggttgtagtgagccgagattgcaccactgtgctccagactgggcaacaagagcgaaactccatctcaaaaaaaaaaaagtgttcctttgataaagacagtccctgtccttgcccctaccctcagcccagggtttttcaaagacattattgccattttgtctggactaaatctctgttgggggcgggggtgtcctctgtctggtggggtgtttagcagcttccctagcctctactcactagatgccagcacctcaccctaaccttgtggcagccaaaaatgtcttcacacacatgccaaaatgtcctggtggggagttagcaaaatcgccccagttgagaactacggccttaacctgcctcaaaaagctgctcacaggagaggactgaggaaaagccggaggcaaggtgggggttctgcccagaaggaaagcgaagattggcaaactcggagggaccccaggaagtggtgggcaggatttgaagacccaaagtgtggtataccgggtgggggtaggtggacagtgggtgataggaccaagctgtactgaaatctagaatgatactagattcacaaccctcctgtggcccccatctggccccccacgggaggagaagtgatgggtagttactgcggcttttcccattctgaaattgtcacctgcagctgcacctgctggtggtgccttctagaatggtcggcacccccaacccagccctctcccagataatgggcaacatgagtatctcgggggtgtgctgtgtctctttcaagatgactgtcaaaagcaaacaaaagcagattgtttaacagacatggcagcaaagctgaaactccctctagcttgagtgcaggaggttctcacttttagcctcgtctttgccattcacgaatcaattgtgaatattgtctgagcacctgtcaggtgccccactccctgctaagtctagccggatcgagcaaagtctctgccctccagatcgagcaaagtctctgccctccagaggtcaacaagctgtggagacaggggaaaggaggggaggagagtggctgggaggaggacatggagttgggggcagaagaggccaggcctggctggggtgcccctccctcctgggcttccaggctgaggtttctgcccttctcaccagggatggctccttcagtgagcacccagctcttccccagagacttggacagttgcttcaggccatttgactgggacctttttccttcctctggatggttttgtcctgctggtcaccctgagccccagagagccccattgaggggccacacttagcttgagggagttcttgatgggtaggatgaatcaagggttgagcgtggcagaagtcattgccctcccccccaaatcccagaactttggctgaatcatctcatccagaacctgagagagcaggtgagcaggaggggatggttgggcagaggatggtgtggaccagatgcgggagtggggatttcagcgggtgagctaacccggggctggaaatgtgcaacatgccccgctcgcccatcatctgcccagcatgcccggctcccacctggctttgggggcatctctgggagaatggcgcatctggtgctgttgcagactggggtccgcgggcaaggccagggcagggcttactcttgtgcatgaaggactgggttggtcgggagcctggggctgtgttgggcctcagagccggccctcataggtctctatgctacggagccagcagtcaacaggaagtgagtcccagcatgagaggaggccatgtggtcccaggcaggaagtgagtgacagtggagttgcctccagcagctttgcggggctcagagcctgccccaatctgaggtgtctgcagggcagcaaatgatgagaagaaaggaagacgcagccatgaaaaagtctggctctgacctaagcttcttagctcaagttagccaggcaggaccccacgcatacctctatggtagtgccatgttgggggctttggggtacctggaacagctggatcccagaaggtggctgcagtgcaggggtacactccacttttcaggctgctggggctcatgactgagccttgaagggtgacagacagggtttacaccagggaggaccattctaggctggaaatgccctctttgcttaagcagggagggaggagaggtgttctgagttctggggagggtcctgacacacaggatggaggcaggggtctgccgttccactttccttcccggatttggccttcctggctctgctggcatcagcccaagcccccaagcacagtggaggacttctcgcttttaccagtcacctcctcttcctctcgttgcagccccctgcctccaactgctgaggagtacacacatgcagctttctgtgggtgcttccctcctggaagcaggcctgcccagctgccccgcacagcaggaaaggagcttggcaggccctgcagttccttctgctccctctccggctgctccctgtgcccgggtccccatccagggaggaaagcatacctgagaagactctggttttgtttttgtttttgttttcccaaggcccttgtccctaattgccacctctgggcgttccttgccaaataacagtgggttgagagttcaggtcctagaccgttagagcaaaagcagccttggaaatagggctttgcaggggaggggctggggacccagtgctgtctcaggctgtgcacttgagtggtgggaaactctggagggaatttggcagtatctctgcacatttagctggacaggccctttcacccggcctgaccacttctggaactccgtcccatggaaacacgcagctgtacagagctgtaagtgcaagggtgttcactgcagtgaaaagcaaatcagcccaaatgcccaccatcagggaacggcatgcatacattttggagcatccagatccatctgcactgggatggagggatgcccactctgcttgttaagtgaaaaagcaagttgcagaacattacgactagtatgatacccttttggaaaaaaacatttctggatctgaatgtgtatatgaatacatatgtataaacatgtaacttacacatgattgtcaatgcataggaaaaaatctggaaaggatgctcactgaactgttaataatgggtaccttaggggagagattttgggggtagggagctgaaataggagctttaaccttttagcattatttttttttttttgtatagtcttttttttttttttttttttttttttttttagatggagtctcactctgttgcccaggctggagtgcagtggagcagtttcagctcactgcaacctctacctcctggattcaagtgattctcctgcctcagcctcccaaatagctgagatgacaggcatgcaccaccacacccagctaatttttagtagaaacagggttttgccatgttggccaggctggtctcaaactcctgacctcaggtgatatgtgagggagcctgcctcagcctcccaaagtgctaggattataggcgtaagccaccacgcctggctacagtttgatttttttatgatatatgtgactgacttttataagtagaaaaaaaaagacaagaaagacaaaatctccattggtctagaccagtcatctccacctgacaggtggggaaactgagatgctgagagcagtgccttccttatctgaggcttgccgtgctgatgctgtccctgcctttctactgggtaggtgttctgcatacggagccagcgaggcagagttgctgagtgcagcctggtgcctgtgggtgtggcagagtgccgagccatggggacccctgcctgttcctgtcccacactggacacctccattcttcttgaggtgtcctggcccacttgcctctggatggctgaggactgaatatatatacacagcagagcacacagcaggcacccggctctcctgctcttgctttgtccttgcaaagcctgtgacctggagcaaatcacaaaattccagagagcctcaggttcctcacctgcttcccagggaggctgagaaactctgaggaggtagtaagtgaggagctttgtccactgcgcagtgacacacacagacagccaggattattctttatttgatttttattacctggaaccttagcgagttcagttcttagactctaggggataaagaaatgatttcccttgaagggagaatgagagaccccagtgctcaggaagagttgttgcagagcctgaaaactgtttgccagagccttggctcttctgggtctgagtgcctgaaagaatctggggcggcccaggccaggggagaaggctacgctaggctatgagcctacagaatggttttttgggggtcctccttcgactctcatgcctcaagagaccaagaggaaagctgggagggcactgaccacagaagtcagaccagcctgagtcccagacttgatctggtggcactggaatcttctaagggagaggggggtcttattggattatgggtggcacaaggagcttttttttttttttttttttttgaggcggagtcttgctctgtcgcaaggctggagtgcaatggcgtgatctcggctcaccgcaaactctgcctcccaggttcaagcggttctcctgcctcagcctcccgagtacctgggattacgggcatgcaccaccatccccaactaactttgtatttttagtagagatggggtttctccatgttggccaggctgctcttaaactcccgacctcaagtgattcacctgcctcagcctcccaaagtgctgggattacaggtgtgagccaccacgcctggccggagcatttcttttttaacaggggctgcagagaaggcttggacgtcctatgtaacctcagtgagtggcggtgggatgggggagccgatcccttgagaagtgcaaccaggctggcaaacctgcttggattcttttcctgtttctgaagctggagtccacagactcgtgatttcaaggggtcaagcccaggaatcctttgatgttgaaagcaaaattgtgaatgtatctgtttgcatgaaggtttatatgaacacagtttctggacagaaagtgcataacattctctagaatttcagagcggtcaatgatccaaaacaggctaagcccactgatctaaccctcctcttgtgtatctttcttacatttgcaggtggaaagcggtgacacgccaaaggaccctgcggtgatctccaagtccccatccatggcccaggactcaggcgcctcagagctattacccaatggggacttggagaagcggagtgagccccagccagaggaggggagccctgctggggggcagaagggcggggccccagcagagggagagggtgcagctgagaccctgcctgaagcctcaagagcagtggaaaatggctgctgcacccccaaggagggccgaggagcccctgcagaagcgggtgagtcctcagcaccaggggcagcctcttctgggcccaccagcataccctgagagtcagggacttggctctccagcaggtcccaggaaggatggtctgggtcgtggctaaaggtctgcttgccaaggctatggcctggaggctactggctggatgcagcctgcgcatatgttttatttggcccatagagtgttttaaacatttaaaaaattagttgccagtatttaaaaatcaaaaaatttcacataaaaatctggagttttggcttctcatgaaaaaaaaaaaagctagatctggcaacagcgggctttcataacgccaacgattgctagactgggataatggcggtccctccatcgccttctgtggctggttgtgggccttagttttctgcagctctacctggcctgcttactctcccacgtgccatgcagttcctgggggttgctgtatttgtagcccctggcctgggcactcaagggcagcagataccctgtttgcctccctgagtgcagaggtcctgagcccaccctagttgggctgactcaactggaaatttggttgtgacagtggcgtggggagagggctgggtgattgtattctgtgtactgcccagcccaggcctcttcatctggggactttttggcctaaccctggaagcctggaaagttgcccacttttctctttcaggttaagccagcaatttcagggccaaccgagctgtaaacatgttagtaatgaggacaactagcatttgtacagggcttcacagtttacaaagcgctttctcatacattatcacatttgatcctcccagggccctgccaggttgttttgcatatgtgcattttaatttcaaaaagtcttccttccaagcgtgtatgatgaaatgagtaaattgattaattggcgtaacttattttgcatggatccaacctaatgttcatgcaggatagagaacatttccagaatacaaatttccaaacttattaagaagcttttattcatttattattcgacaaatatgtatgatgctcccactatgtgcagaacactacagagggaatctgtattagttgttttatttactcctctaacaatcttattcaagagatatgattatcctcatttcaggagaaaaatattgaggcttaaaacaatgatgtgacttgctcatggagccccaaccttaagtggcagatccagggctcattcagtcctggtcttgtgcctttctactattttccgctgtcctggaatgggacttggtgcggagacgggtcctgaattgtctaggcctcttgcacatattctgatacttcccgagagtgggaagggcctgaggggagtgaaacagatgaggaaagggagaagacaccatccttcccattaacaatgccaggtgtgtgagagaacccatcagccctgcccttccaaatgtggtgcttcccatgggctgactgcagttgacttcgcttcccaggaccccaccatgactcctgccgagctgctacccagggtcacggcattccttcctgccctgaagcatggagccatagccccaaagctgttctctggccttgagggtttgttttcactttgggatttccctacttccatttctagctgttctcaagggctcctgcatcgatcagtcaacaggtgtttcttaaaacacccattcagggtgtgctaggatccataccagggactggggaaactattatgaacaaaaacctgcttcttgccctcaaggacctcacagtcagctggagagacagacattaatgagaaatccacccttaaaaagatgagattacacatggagataagcgctctaagggaagtgaaacatgtccaggggaactgcaacgaagaacctgagttggcctgggctgtccagcgcgagctgaagggcgaagggagtccactgggtgaggggtagagggagagagtgagaacagggaagaaggctcccaggtgggagggagcagggcacccagggaactgatagatgtcacaaggctagagtgcagagagcaaaggagaagggtgtggaaagtgctggggcagacaggccaggccttcaaaggtggctgccggggtggggggtgggggggcggggaggcggggggtggggaggcggggagtgggcagtgtgtgtgatgtaatcagctttgcaatttgaaaagctcatgtcatctggatcctgggatggaatggaggagctgggaagcaggatgacatcggaggggctgatgagcaggatggcagcagagatgaagggaggggacaaatgccaggaacatgagaggtgagggagagatgctgtcaaggatgattcctgggtctgggactttcagacaggtggatcttccttagaatcttagtgctgagtgtggtgggcaaaaactctttaagtctccttgacctccaaaatttggccttgaggctgggcacagtggctcatgctggtaatcctagcactttgggaggcccaggcgggcagatgacttgaggtcaggagttcgagaccagccgggccaacacagtgaaaccttgtctctactaaaaatacaaaaaaaaattagtcgagcttggtggtgcatgcctgtagtcgcagctactccggagtctgagacaggagaatcacttaaacccgggaggtggaggttgcagtaagccaagattgtgccactgcactccagcctgggcaatagagtgagactccatctcaaaaaaatacaaaaaaaaaaaacaaactttggccttggtacactcctgtgtggtcccagctatccaggaagtatagattctggcagggatcagagctggtaggatccctgaaggccactgcactgcctggaagctgaaattggtgagatgttacctcgcggggtgggcagtggcctaggctctgccaatatgcaacggacagtggcttaatcagggtgtggaggctcggtcacggttccagcagtcagctgacatagaacacatgctcagctggttgattcagatgaggaaggagactaaggccccggagaggatgtggctcggccgtggtctcctttcagttccccttattccaggtctcttttcaggggatgctctcctggaacccctttcattagctcctgtacagcaaaaacagactttttaaggcagcgtttcttgtagcctgagcatgtgctgaaagtacagccaggagaaagaatcaggaagacgggagatgatgagatgagtgatagggacaggagccaacacccgacaggcctgtgcttgtcttgggtctgttcctgcccccgccagcattaatgccataatgatgatgattcaggtggcagtggcgatgtggctttcccttattgagtattgactgtattgggcattctctctcctcgctactcacagtggtccatagaccagcagtgttggcagcacccaggaatttagaaatgcagaattccaggctccactgaagacctgctggatcagaatctgcattttaaagagggcctcatgcttcccatgtatatgaaagtttcagaagctctgctgtgtattatgccccatgtgtgatcacgggaggaagatttttttttttttttgagacagcgtctcattcactctgtcgctcaggctggagtgcagtggcacaatcttggcttactgcaacctccacctcccaggttgaagcgattctcctgcctcagcctccggagtagctgggattacaggcgccagccaccatacctggttaatttttgtaattttagtagagacagggtttcgccatgttggccaggctggtcgtggactcctgatctcaagtgatctgcccaccttggccttccaaagtgctgagattacaggcatgagccactgcactcagcctggaagactcttattatcctcatttttcagatggggagactgaagcttcagaaaggttaaattacttacccaagattatgcaactggtgagagaccggattagggtcagcacaaaacccctctctactctgagcatagggccccttttcaggccagtgactgccctctgaggtaaacctggctacagcctggtcatggagatttgagttcattttaaagagaacttgggtggcctctggctgagtatagctcagactcgaaggcgagtgttagaagcaccctggcctcccctgcccccaagtcctgagatgcactagggtcatgttcgggcctgtcagggccacactggaaggtcacaaccacctggccctggcggtgaccctgggcctgggccaggagcagttgggctgcataggccgtactgagagagcagctgaccctccctgactcacgacaagtgccgcattccgaggcggcccggccaggctggaaagcgtgtgtgtctgtgtgtgtgtgtgtgtgtgtgtgtgtgtgtgtgtgtgatcactcaagtgggcatgcgcagagtctgtcagggagaaaattccagaaagaagccagttggaaactgcatagggaaaaatcgttctgttttggggagcttggggggctgggaaattaggaagggggtcacattgagaaataacagtagtggtgcagcggagagggagcttgccggggcatcaggacccctgaaaagctcatctcagctccggccttaagtcactccaccccccaggtctcagctttctgcaaaatttaagtgctgaacaagtactcaatgatctctgcaaagcctttcaaccctgattttctaatattctaatgaataaataattatccgtaaaagtaattaaatgccatggagggtcccaagtaggaaacgtttgaggttctaaagcgggctggggagaaaatgcagtcggaagccccaagtccaggtccgagagccagcccgggggtcctccactccccgccctagccgcagggctgacacagtggttcccagcgccaccgcgagccccggagccccgccgcgtcagggtccgccgggaccgccaggccgcccccaggccgccacctgatcgcgagcaggcgccccctgctgggagcccggggcctcaccgggcagagcaacgaggtctgggaggagggggaagccctggcctgggaacggggaggccccggacaggctggagggggcccccgcgaaaaaagtggggagctggctgtggtgggagagaggacggaaaggaaacagggaggcagagccagacaagatgggtgagacagcccttaaaaggccggtcacgaacaaagcgctggcgagtgcgcgcccgcccacgcgcacaggtgcccgcgacaagacgccccgtccccgcccacgcggcccccgcgggctgagcccggcgccaggcccgcacccacggtggccctcctgcctccctccccctggtgctcccgggcctagctagcgggagtcgctgtcaccagggacagaaccacggaggacagcgctgtcctgggcgcccggggtcagcccaaaaccagtccaggacccccctgtcacgagggaagggagtggcctcccgggctgaggacccgcggcgtgaacactgtggctggcttccgcttcacagccaggagatgaagtcggggctgttttttccgtttcaggctctttgtctccccccaccccaagctaccatgagccagccttagtgaccttcctgcagtgggcccaggcccgatacgctgtcggttcccgacaaagaagctcaggggcccaggtggaaggagggctcacttccccacctccagcaagaagctatgggaggcagaatcagccagccccgcagcctccggggcgctgggcctggaaggggtgcctggaaagggtggtgaggacctggtggggagtgcagggggatgcctgggaggagcgcagctcccctcatgctgggggcttggagaagcacagggagagggcaaggtctcaatagggaaattgagacttccctgccaggacctggaatcagggcccagtagaggaaatgaatccttagggaaggagaaccacactaacatgtattgagcacctacagtatgccaggccccacagtaggcacttaatgctcaccataacctaatgattttagaacatttatctaccttgattcagtgggaaaacaggccaggagaggttacagaggtcacactggaatccaaactcaagtcttctagattaaaggctgagctcaggggcctgagcatggggcagggagtggagggacggagaatgagattagtaatagaatcataatatttggacctgcaggcggaccttggaaatcgcatccagcatccttattttccagatgaggaaactgagtctcgtagagaggaagttgcttcaccggggtcttgttccagttggcccggtacccaccgccccccagtacatgcccttatgcccagaaggcctctgcaaacactcccttgcagggccagggaggccgctcaggctggccctctggcccaggccttcctgcaccccctcctccttccgcaccccctctgccttcctgctcctcctttggggaaggaggtctcttgactgggagcagcagaatgggggtatttttagtccccttctgtgtacctgagacagagttgacaggccagaaacccagctctgaatttcctcgtgttccctcttgcctgggcctcaaggcctgcccctgcccgagttctttctctgccctaggccctgctgggtcctcagggtcagcactgtgcctggcatgtggtgggccatcatatttaacacatgaacagctaaacggccagaggacccccatcccctgtggcagggaccccaggcacaaggtggggcctgtgagccactccagtaattctgccgaccaacgaactggtccctttgttcttccctctccacaggcaaagaacagaaggagaccaacatcgaatccatgaaaatggaggcaagtgttccacccccaggggctctgtggatcctgattctagaagaaggacacgggtggcgagtgtgtgtgagggggcggagggtgggcccctcctccttctttacacatccctctgtgggaaggagaggaagtgggcgtggaggttggaagtcccccaacaaggcagccggctcatccccctccagaggccagacgcctcccttcgtggcctgtggccgtgtccatgtgcccccccacccccgccacacatgcccctcgctcctccagcccacacggggcctgcccagcactcccaggggtgccctctctggccaggagccagtgtccacattgtgtttgaggcgagtgcctccttggtgggtccgtcagtgcccaccctaatgccctaatgtctgtctctctgtcctagggctcccggggccggctgcggggtggcttgggctgggagtccagcctccgtcagcggcccatgccgaggctcaccttccaggcgggggacccctactacatcagcaagcgcaagcgggacgagtggctggcacgctggaaaagggaggtgaggcgccttctggcctgggccccagcccgtcctgcagaactggaaaaccagaagtgatgggcctcagtttccccttcaggctaacccttagaacttactgggagcctcttaatctctagtcatgatgactggttcatctgctccttcagcagatgcttattgaacacttactgtatacctggctgtgtactagaccctgggcgtatacggttcctgctctcatggagttgacattctgatgggggagacaggcagaacataaagaaacaaggggctgaaatagaagatagcagaggcctgctttagttggggtggtcaagacaggcttcttggaggaggtggcatttcagttaaggtctgaaggaaccgaagagctggctctgtgaggagtggggtcagggagagtgttctaggcagaggaaacagcaccagcaaggccttgacttgtttggcaaactgtatgccagggtgaaatggcaaaggagaaagggccagatgcagccagagaggcaggcggggctccacacatcagttggagacctgcagagtctgcccaaaagctggcttacttctgacaatactgggcagccatagaaggtttctgtgcacaggaaggatgtgatgtggatttgagaggcagcagtggagacagagaagagctttggggtgtattttggagctagaatagctagggcttgctgatggaccggcagggaggggaactggtggactcaaggaggactcacaggggtctggcctgaacacctggtgatggttgtgccatttgctcagatgggaagacccaggggaggatgagtttgggacaggtgggaattgagggctccgtgtgagatgccaggtgcctggagtctgggctgtagggaagtacgggcgacagaggtgggatttgagagcagaaccctggcatttaaatccatgggaacttaagggctcagcaaggggagaaggaggagagacgaagtctcagaacatgtccatgaaaaccccgacatttctgggccacatggagaggaggagtggcaggcagtagggactgagggagaaagcagtacagagcggtgtctggggaagcacggggttttcccagagggtggctgcccagccctagggaaagctgaattcactgagacatgcccatggcgttggacaacctggaaaggagctggtgactttatagagaagcttctgtgggggtcggggaggtgggaacagcccgtggagggcttcagccatgcagagaggtgagaaaatggaggctgaaagactgaggagggaaatcaactcgccacgcacaatttttgagctgtcttgtatgtttgattagtagagaactgggtacaaagagaagtgggtggtgacctagctgcacaggaaaagagaggaaactgccaccacgtggggcacttcacgtgaactcagctctcatttcgtctttaccccaggcctccaggggaaggcggccctgtttgtctgttcgcctttgtgtgagagctttctctagagaaagtgcagaacagaggccaggcgcggtggcttacacctgtaatctcagcactttgggaagctgaaaggaggtcaggagttcgagaccagcctggctagcttggtgaacccctgtctctaccaaaaatacaaaaaattagccaggcgtggtggctcatgcctgtaatcccagcactttgggaggctgaggcgggcggatcacctaaggtcaggagttcgagaccagtctgcccaacatggcaaaaccctgtttctactaaaaagacaaaaaattagccgggcatggtggcaggcgcctgtaatcccagctactcaggagactgaggcaggagaatcacttgaacccgggaggcggaggttgcagtgagctgagatcacaccactacactccagcctggacaacaagagcaaaactctgtctcaaaaaaaaaaaaaatacaaacaattagccaggtgtggtggtgcgtgcctatagtcccagctactcaagaggctgaggcaggagaattgcttgaacccgacaggtggaggttgcggtgaggcgagattgagccactgcactccagcctgggcaacagagcaaaattccgtctcaaaaaaaaaaaaaaaagagaaagtgcagaacagggtgggggttctggctgcttgattgttttcttttcctctgggatccaggaaggcagaaattactttcccggaagagcccggagaaagggcagcctgtctgaggtctgggaggagaggcacttacccctgtgcgtggaatgttgtgtttggggtggaaattcaggaatggggctcttctctccaagtcagtcgctgcactcctgggttccccgcaacccagaaacaggggctttgctttttagctcctggttctgtgagcgaagtgtttctgttctcatttagccctggggcaagaagcttagactatgacttttaggaaccggaagaactttcagaaattccatgattctcaaactctgctcccttgaagaagcagtatggaggcctgccctcagttacagtgaaaaaaagggttctttcctcaactcccaggaaaaattagatcatagatacattttctcaattttaggtctctactaaaatttaaaaagacttttttgggctggacgcagtggctcacacctgtaaccccagcacttcgggaggccgaggcgggtggatcaccttaggtcaggagtttgagaccagcctggccaacatgttgaaaccccatctgtactacaaatacaaaaattagctgggcatagtggcgggcacctgtaatcccagctacttgggaggctgaggcaggagaatcactggaacccaggaggcagaggttgcagtgagccgagattgtgccactgcactccagcctgggtgacagaacgagactctgtctcaaaaaaacaaaacagactttgtaaaactcatgaacattttctaacatatgcagaagcagagagtagtgtaacgacctcccattgccatcacctggctccagcaattatcaaaagattttctagtaagtcttcaacccttggcatttgcatccccactcccaaccaatgaaggtagcagtgggcattattagaaaaaccaaaatgttgatttaatttaaaagactttagtacacttgacttgcaatgtggagatctccaaacaaaatatattttctgctaataacattattccttattcctatgctgtaattaaagaatccatgaattccagtacaagttttagaactactgatctcattttcagactaggggacttggggctaccgagttttataactggccacaagctcccaatgaagaattgggaacaggactagaatggaattagaatttacgtttcctattccaatgtggggcccaggccctgactgtcacacagtctcctcctgggctatgcctggggttaggaaggggctagatgcaggtatcaagaatggggaaaacacaggtagctttcaagattcccaagtcgccctcagactcaagagtagtagctgttgctatcaggcctgttttctttgtttgtctgtttttgagacggagtttcactcttgttgtcaaggctggagtgcaaaggctggagtgcaatggctcactgcagcctccgcctcctgggttgaggcgattctcctgcctcagcctcccgagtggctgggatcacaggcacctgctgacacacccggctaactttttgtatttttagtagagatgggggtttcaccatgttggtcaggctggtcttgaactcttgacctcaggtgatctgcccgccttggcctcccgaagtgctgggattacaggcatgaatcactgcacccggcctatcaggcctgtttttgttttttggtttttgtttttttgagacggagtttcgcacttgttgcccaagctggagtgcaatggcacaatctcagctcactgcaacctccatctcccaggttcaagcgattctcctgcctcagcctcccgagtagctgggattacaggcgtgcaccaccacacccggctaattttttgtaatgttttctaagtggtgtaacaacagcacagacatttctcctcttttctcagtctcattttgctctctgacatttgagcccttctgaaactgcctccctgggccttcccaaggccgctgcaggttcctccccacctccttcagctgatctcaagcggcaacctctgttagctgcatccccagatctccaccccccaccctctgccagtgttgatccactgaccccttacccaccctcctagatccaagtaccctcctcctcccaaaaaaggcacctcccctcctgacaaaccacccagccttcaggacccagctccagctgttccccaggcaatatcacttgaagggccagccagcgcttcctaatctcagaatgcaacgcctgcaacctttcattcagggcacctttactgagccggtttccagaagcctccacagctgagtgacatgtaagatactgggactaccagaggcatagaggattcctagttttcccatgataggatgagggctcatagcacctgcagaaagagctgccctgaatggggcgtagacgaatgctgcctggggtcatctacgcatcagcaggggtggcttctggcttttgacggttgaactggaatttaggggagggctgaggaaggcatttcagagggaggaatacagcaggcacatacctctcgaggcacaagacacttgggcttttcaggaatgggagtttgttgtggtggtgcacagcgggtgtgggcagaaagcagctaggaaatgtggctggaaggtggggcaggggccagaaggaggagctgccaccagaccccaggctgcaccagcccttcccctaggctgtgtgccccacctggggggcttcttccctgggaacgcactccccagcttaacttccttctccttgcccacccttgttggaccacagttactgagtgagcctctcccagattacccccttcaggctttccctcccccaagatttaagacgactcagaatgtcacaaaatgaaagaaatggaaaataagtgaacggggaaaatgagacatttctgcagtccctgaggctgaagtgagaattcctgctggagctgggaaggaagttgttgtcttctgtctgttccatctcctgttgctgttccttcacctgcttactagtcctgtaaggactaagctctgttttaatcatgatcacaccctgccatagaacctccaatggctccccattgtctcccccatcatgtcagataccctctggctatttctcaagtcttcaacccttcgacctccacaatcagcccaccccactttcactacagtcctctaatagaagggtgtcccctaggaagggacattgccatgctccttccttccttcctgtcatcgttcctgctgtgatttccccagtccattcttcagggttgaggccaagagctgctgcctcctccaggaaggtttccaagatttctccagtccacaatgacctcttcccttccctgaatccctgtaaccctcactggggtttgtttgtttgtctgagacagtttcactctgtctcccaggctggggtgcagtggtgcagtctcttggctcactgcaacctccacctcccaggttcaagtgattctcgtgcctcgcctcagccttcccagtagctggaattacaggcacgcaccaccacacccagctaatttttatattttaagtagagatggggttttgctatgttgacctggctggtctcgaactcctgaccccaagtgatccgcctgctttggcctcccaaagtactggaattacaggcatgagccactgcactcagactgtccttacggttaatattacttagcactcaatcatatttcatcagggtatttttcactgtttcttatgtgttgatcacatcttcctctgtctggcctaatgcaatgggcagggagaacaggcccagtgaatacctgctggctggctaagcagttgggaggtaggtgaatgtgggaccacttctctgggaacatgagatcttagatttccaccatgacaagggcccacacacttgatttcgaggtggtttttccaggggtgctgacaggtgtacctggaggatggcatggggactggtatggacagcctccatgggtaaaggggggccagagtctcctccatcctgtattcctgccattctcaccaggcttctgagctgaggagaaccttccttggcctggcagagctggccagggctgtggggagggcagggtagggcagttcctcctcccaaaggaaggcactcccttagctcctcttccttctaattctcagagcaaaatgcactctgatggagggcttgagggttaggaagggcctctcgcttcattagccctccctgtagctctgcaaggcagatgagcacagagacccagggtcagtagctgggcggtcatctcgcctgggaagccactcactccagtttgtgtcgcggctggtggttttaggactcagttacagcacattgatggcatgactcgctcattaatctcttcaccccagccggattctaaattccgtctaggcagcgggtaccatgtcctattgttctaggatctggtctctttcctgcttccgacctgaaggtagggacccttgactcatgcatccttatacttattagatgcttaataatattgaatagtgataatgaaacatctgtgactggaacatcatagtctctcctcccttccctcgccacactgagatacaacccactccctccgcccagggctgcccagcagatagcagagccttcatggaccttaagggttggctgctgtttactgcgacctttggaggcaagttcaaatactgccttaagaaaggtcccacttactgggtgtgggaccttaggcatcacttaccctgtaccccagctgaggttcctcctctgtggatggacttggctgtactctgcatctccatgacagcagcactcgccagcttgttttctgcctctacccatttctgcatttaagctcgttcaatacaggcattctgggcaccccctgcccccagggctggcatgtgggaggtgcagggtgaaagtgtgctgaatgaatgaacaattcttatctcagagttgtgtggacaacacacaacatttaaagctcctagcacagagctagcatataataggaactttataattttttagaaagtattttaaattacataagtattacacaaatacattcttgtgaaaaagtccgcccaaacttgccaccccaaaattttattttgagacagggtcctgctccattggccaggctggagtacaatggcatgatcatggctcactgcagcctcaacttcttggctcaggtgatcctcccacctaagcctcctgagtagctgggaccacaggcatgtgccaccacacttggctaatttttaaattttttgtagagatgggggtctccttatgttgaccaggctggctttgaactcctgggctcaagcagtccttttgcctccacctcccaaagtactgggattacaggcatgagccaccacacctggcctgaaaatttaattccttcaccagaaatacttgatgctatcagtttggtgtaacgtcatgattttttcctatccgtgtgtatgcgtgtaaatatataattttgcttcaggggttctttttttcctgttctttttacacaaatggaaccacactgtagtttcattttacagcttggtttttgacttccaataagtctgtgcaatctagccacgtaattactattatattccaccatgtggattcccatggttttatttagccattctgttattggtggccatttatgttgtttatgatattttactgtttagcattgcagcggtgaacatccttagtcatacctctttgtgcatctgtttctctaagacagatacctagaaagaaaaaggcctagctgaagggaatgtgcattttacattttatgacatctgccaaactgccctctaaaaagggcactccaatttatgcttctgtgaacagggtatgagaagacctttgccaacatcaatattttgctagtcaaatgggtgggaaaatagtatcttgttatgcttttaattggcatttcccagataataaggttgaacatcttttcctatgtttattggccatttgtgctgctgcttctatgagcttagcaaatgttgcctcctctgactttacaaccctgcagtctcaacagactgtgcttcctgtctgccctgaggagagcaggccatgaatgtccagaaggtcccccatgctgtgtcatattccatttaataagcagtcactcagcacctactaagtaaaggggccttgtgctaggggctatgggaaggaggagataataaggtgtgatctcctgggctttagtctagttcaggagaaatggaagtgcaaagtagaccagtaaaggctcaaaacaaattattagccaactgtatgggaagcagttttagagcatttggactggaagacattcctcacttatttgccctacctgaccttttgcagcgtggcctcaaaaataacatcacccttgaaggagatgatgatgtttggagtaggcacagcaagtatactttacccaaggctgaacaagttctagaggctcccatgacagcctgtaagcagtagtgacttcgagggctggcctttaccataggctactaaagttgccacagagggactccccattgtcctttaagtagatgggttggttgcgcaccagagtcttcacttctggggcacagagagaacagctcttagaacaacccctactttttagtggtgagaaaaaaagaggcagggtggggtaggtgactagttgctggcccagggccaactcctggccacagcaaagcctgaaccagggaaagggtgttgaacttcactgagcacctactttacatcaggcactatgccaggagcattagctttcaccacaatcctaaaacatattatctgcatttaatgtcttttttttttttttgagatggagtcttactctgtcacccagtctgaagtgcagtggcatgatctcagctcactgcaacctctgcctcttgggttcaagcgattctcctgccccagcctcccaagtagctaggattacaggcacctgccaccacacccggctaattttttgtatttttaggagagatggggtttcaccatgttggccaggctggtcttgaactcctgacctcaggtgatccacctgcctcagcctccaaagtgctgggattacaggcatgagccaccgcgcccggccagaagtatttttttaacctgtattttgctattagaaaattaagatttatctaggtaagtaggttgcggccacatgggtatcctgatggagtggcccaatgggcaaaactagactccaaatctcgtgttgcttctgttgtgtacccaaatgactaacctacactcccagttttcctggtttcctggcttggaaattgtcatgaaattgaagaatgcatttagaagagagggagagagctggcccggctttccagcctgccgcatgctcttcccgcccccggcctgcagttgttggggctgctccccatgcctctttgccaggaggctcaggtccctttcagcctccccgaccacccctccctgctctactcatgtggtcctgaacccttgcccttgaattgctgttttttcatgaccatgtggatgatgttgtgaaactggattaagaaaatgttggaatgagatttgggaggcctggtttctcgtctcagcttctgcccctccttagctatggatgtgaggaggtctttctgctttcggcattttagtttcctggtttataatgcgacagaaatagatgagatgaccccagagattctaaaattccatcacggcaggttggggggtgagactggaatcatgatctgcactctctttattacctagattaccttgtacataaattctaaattaaatatttgagtgaattctcagacctcgcatatacgtctcttctaaaggcacatacgtgaagcatccttataaaaactctttttggccgggggtggtggctcacgcctgtaatcccagcactttgggaggcgaaggcaggcgtatcatgaggtcagcagatcgagaccatcctggctaacatggtgaaaccccctctctactaaaaatacaaaaaattagccgggcgtggtggcaggcacctcccagctactcgggaggctgaggcaggagaatggcgtgaacccgggaggcggagcttgcagtgagccgagatcgcaccactgcactccagcctgggcgacagagccagactctgtctcacaaaaaaaaacaaaacaaaaaactctttttaaaaaaaaaacctttggcccagcacagtggctcacgcctgtaatcccaacactgtgggaggccaaggcgggtggatctcttgaggccaggaattcgagaccagtctggctaacatggtgaaacgccgtctctactgaaaatacaaaaattagctgggcgtggtggcacatgcctgtaatcccagctacttggaaggctgaggcacaagaatcgtttgagccagggtggtggaggttgcagtgagtcaagattgcgccactgcactccagcctgggcgacagagcgagaccttgtctcaaaaaaaaaaaaaaaaaaaaaaaaaccaaagggttgtccagcctttactgagcagatactgtgtgctcagtctttaagataccaccttgtgtgtctgggtgtctactatgttccaacattttctagacactaaggaagcaaatttaaaggcaagtcagaattctaccctcccctgtgagaggttggtaggtaaatgaatgaattgtgctgtagccagggcagggttgttttagaaatactaagggaaggactgtgcaagcaactccctagccctgcctaagggcctcagggaaggcggtgcctagggagaggcagtgtaccgccattgacctgaacaggactgcttggcagggacagtgggggaagggcatggagtggggtcctaagggaggtggtcaaagaaatcctctaggagtttggagtctagagtgcctcaaagtttttcccatagcactgtctatggggctgacaaagcagaaaatataatagccaatgttctctctgctttaaaaaccagactgcttgtcagggaggccgtgggatgttcacatatggggtggtctgccagagccctctgccgctttattaagaggccagtacactcgttaaaggagttaatggacctcagtacttactactgattgcttagtaattcagtacttggtaaataaacatgatactatgctagtggcggggtagggggagaccaattggatatagtccctgtcccagaggcacacattgtcaagtggaggaggcaggaatgtttccaacaagcctcagtggcagtcagagcgtggggcttgctctgtgctcctgtgtaaagagcccaacatgaagcataaaggagcatgagagcagcttctggaggactccaggaaagcttcctggaggaggcaggcatcctttgagaatttcagtaagtgcaaaagaggctgggtgcagtgtaatcccagcactttgggagaccaaagtgggaggattgcttgagcccaggagttcaagagcagcctgggcaacatggccagacccactctctacaaaaaaaatatttaattagctgggcatggtgttgtgcaccaatggtcccagctactcaggaggctgaggtcgaggctgcagtgagccatgatcatgccactggactccagcctgggtgacagagtgagatactatctcaataaattataaacaaacaaataaaaaagtgttaaagaggaggaaggcatttcaggaaaaggaactactgagggcaaagagaaggaggcatgacttctgggttgtttagggagtagtaagagatctggtaactagggtgcaggggttagggaggatgggcaagaagagacagaactagaaagcaagatggtcacatcctcagtggtcttcctgccatagtgagaaatttaggcttcgttgtccagtggagagcaggggtggaagagaattggacacatagtttaggaagataacctggcaggacaataagtattccccagagagaggaagtttagaagcaggaccaggtaggagaacattacatttggccttgactgagggttgaggtaatgagaggcaaacttgaaggaattgctagaactggtcctggttggaggggagggaaaaatttgtctggtattgggagctgggctggggatagggttcattatctgaggtagagaatcttggaggaagagcaggtttgaggcaggatgatacagtgaacttttcattttcttatgtattctgatgagcagaagtttttaataaagtccaacttacccatttttttcctttattggttagtgtttgtgtgtgttatctctaagaattctctgtctaccgcaaggtctttaagatattttctcttaggagggggtggatttttgagctagggtttggataagctgcttttgagaagccagcagattggtgtcaatggggacaggttttttttttttttttttttgagacggagtcttgctctctcgccaggctggagtgcagtggcacaatctcagctcactgcaacccttgactccctggttcaagtgattctcctgcctcagcctcccgagtaggtggggttacaggcatgtgctgccatgcccagctaatttttgtatttttagtagagacggggtggggtttcaccatgttggccaggatggtcttgatctcctgatctcatgatctgcccaccttggcctcccaaagtgctgggattacaggtgtgagccactgcgcccgaccccaggggacaggtttagtcagattccagggtggtcctcatggaggggacgcacaggcaggagggcagggagagaaagcacagaaagcagacctgctaggagaggaccaggatagggaggggcagggacaaggacatgggacttctgggagcaggtggccgggggtcaacgtccaggaggatttcctgaaccagttagaggactactgaacccccctttcacctatctatgcagccctttacttttacaatatatacatttctatttattttatttatttatggtttttttttttttttgagacggagtctcactctgtcacccaggctggagtgcagaggtgtgatctcggctcacttcaacctccgcctcctgggttcaagcaatcctcccacctcagcctcccaagtagctgggattataggtgtccgcccccacctctggcttttttttttttttttttttttgagacagagtctcactctgtcacccaggctggagtgcagtggcatggtcttggctcactgcaacctctgcctcccgggttcaagtgattctcctgcctcagcctcctgagtagctgggactataggcacacgccaccatgcctggctaatttttgtaattttagtggagacggggtttcaccatgttggccaggctagtctcaaactcctgagctcagatgatccacccacctcagcctcccaaagtgctgggattacaggcatgagccaccacacttggccacctctggctaatttttgtatttttagtagagatgggttttcaccatgttggccaggctggtctcgaactcctgacctcaagtgatctgcccacctcggcctcccaaagtgctggaattacaggcgtgagccatcatgccgggcctacgttaatttttgagacagagtcttgctctgtcgcccaggctggagtgcagtggcatgctctgatcgtagctcactgcagccttggactcttgggctcaagtgatcctcccacctcagcttcccaagtagctggaattacaggcacgtgccaccatgccctctgtggagccctttctgacttccatcaactccctgcgaccaccccgcatccttcacctctcagtccgcactccctcccaggccaactgcatggtgagtgtgtgtgtgtgctcccaggccaactgcatggtgagtgtgtgtgtgtgcaagtgtgcgtgtgaatgttaccatttttctgacttgccattcttcagtagcaactctacagatgcgacagctcttccccgttcctctttagtccatgaatggtgggcagtataaatattattttcacttgcaactcagatggattgaacaaaaacaggaataacagctcagcctcctgtatatttgacgctagatgctgttggaaaggcagctttgtggggcaaaaaaaaacaaaaattgagtgagcttgcttatatataccaaagatgctcttagacttcaatgtttctcaaagggtgagattgtgtgttacctcaccagaaccacctgggcagtgcattaaaaaggcacactcctggagcagaagctctgggacagtacttgtaggtttgattttctagccagcccccagatgattctggggcttactacagcttgaaaaccaccaagcctcagatgattagaggtaaaccaaatctggcacagatgagattcccacacagatgtattggtagatgcatttattgtatcgcctgcattggcggcgggggtctctctacacattttgtttaaacctgggccaggttaatcacgttgggaatttagtgatgtacccagcaagggtggtttcccaagctctccgggtaattgatagggcttgggttgccagtctgattgtggtaacaagcaaaggaagaagtagggactgtaaggcgggcagacctagggaacagtttccaaacagggttgggggggaaagaccggaaaggacttggtacaggaatttaaatgtttcctttcggatggagatggcaggggtcctgctgttttcagcaatagttaccgcagtgcctgtctgctgggctcctctggagtcttctctttggaccctgaaacttgagagggtctgcatgcctgaatctgaatgcggctcctttaggcccctccctttgacccctggagcctggagaaggggtgggggaagggtggggaaaacaggcctggctgttaaggtttaccaggttccttttggccacaccccccttagtataaacttaacacttctctccagggtccagtttctaaagcaaagtgacagcatcgacacgtccctaaagcaaacttgtcatgaagtccctcacctctcaaatgtgagtccctcctggcttcctttgattttatctgtaatatttagcagatacgtgtgattctattaggctagttaggaaaccaaggcccaaagaagctaggggttatttaaggtcttgtcatcagctgtaaaacaccctgctcagcgccctgctcagtgaaagacctggcatcccctcccagttgaatttcctggtaaggggcacctgagatccggtatcagtggggtactgctactctcccacccctgccctggcatctctgctccctggccccagactccgtcactggtagagctgggcagacccagcagttccaggatagcgggtggaagtgagcaggaaggaagagctgggtttgtggagaagccttccccttatggggcaggctatagggaaagggaaggcagccaccaaagctccagagcctgatggcgcatctattgggctgggacttcccagcatacaccattagggaagtgtagggttggctgggagagaacgagggagccaggggctctgggatagaggtggggagagaaggggaggtgagggtatcagcaagagggaagttgggctttcctttccagcagttgggctcccccatcctgcatcttcctccttgatttagaagaattcatctagagtgtcagtgcaaaaagccccttaccactccccctccctaacagataccctaaggctgtgcttgtgcttttcattcctgccattcatctgccaggaagctcatgcagttacagatgccccctagatctggccattcctgtctgaaaaacctgggaggttgtgcccattcctagtttccgctctttcatcttcccttgagccttcctgccttgactgatcccagctgcctctgagttccttcggcacatgtagaaagcatccctaccacataatttaccatctaattgcatgctgtcttgaatgagggctgtggtttcatgtgtggtgggtcttgggtacacaattaggctgtgagtaacagaggcctagagccccatcatgtctactagctcttgcacctctttgcttcccttccccccagcctacctactgcaggtgctaaggactgactgacctgatccggtgtttaggtgagcttcaggcaggctcccaggataaagcacaattcgcttacaggttctaaaaccagactgctcagtgcaggggttaggggggtgcccctgcccgacagcatttgcccaaatgccgctcctctccccagactcagggaggaggttctggggcagggccgaggtttggggtgatggcatagagcccaaccaggcagcacactgcagttgccatggtgacccttttgcttttcttcaggaggatggatttctcttttagcccaaatcatctgcctgggctactctgagaaccagattcctagccccctaccttccacattctaccacagggggcagcttgtcagaggctttggtttgaaatcacagtccagcatcagacagcaacaggttgtgcttgatcagggagcaggtgggaaaggcccagaggagggctcacctgggacgcatgccccgagggagctgacctccatctccttctgcttcccctcctctctccagaccacttctctccagtgaattgctctgacctttcaggtgggctcgggcctctctaggcctcagtgttctcatttgtaacagacacagccagggtctccgtgtttccacacctggctagtattagaattacccagggaggttttaatagattcctgggccccaccttaagcccgctgatctacgtaggtagaccccaagaatctgtatttttaaagccctccttgggtgatccagatgcaattaaaccaaagtgaatctggggttctcctggcgaggtgattagcaaggccctcgtgaaaagaaaggaagttctgcctgtgctaaggattgactggcctctccgggcttccaggagcttctggagagccccttacagcctagtcttgtcaggaagcgggtgtttcctggtcatgccggctaagccaagaccagacccccacttctctccctccagagaagccaggagagagagaatgacaggaaggggggatgttgccataacaacaagctccaagcagaggcctcccttccaggggctggtacttcaccccagtcctggtggtttccatggagatgggttactgagggacagggggaatgtctgccccacttagagcatcagccaggagctgccagaaggcagaacaccgctaggtgcgagcctttggacccctctgctctccgggtgcacatctgacaccttccccctgcttagttgctctctctgcgactggtctccttagcaacaagtcctgctaactccacgctgttggcttcatggctatttttagcttcactgccagcagcccagtcctggtcatttgcttgcaacctccatatggattgcaagggaataggaaaacaaagattcccagcctcttttggtagactgggacctcgtagcaacgattagaattcctgctatgaaatggatccattccccaacttggaacttgggcagtggatttgggataaggttcctgagacaacactgcattcagttcatttttaatcctctactatgggcaagatgctctagcccacactgcttccatacgaaggtgaatgaggtccagtccctgccctctaggaatatttaatcttgtaaaggagaaagatgagtacacaatcaccttcgcacaaggcaaagactggcaggtcctaacagaggcttacaaagtacaaggggagtgtggcagggatggggtagaagataagggacagaagggaaagataagggacagaagggaaagataagggacagaaggggaggataagggtgaggggccagggcagcactgtcaaaagaactttctgggatgatggcaatgttttaaaatcagtgccatcgaattcagtagcccccagccacatgtggctcttggacacttggaatgtagccagtgtgactgaggaactaaattttaatttgtatttaattcaaatagacacatgcagccagtaactgccatcctggacagtgcaaggctagaggaactttcatggtggaggtcactggcggactggtgtagaaggatatgcagggtttaggtggtgaaagttgaaggggaggaaccttccaggaagaaggaacagcatgaggaatagcaagtgggcgggcaaagcgtgggcttcatgatatcacacggaggcctccagattcgtgggggcctagaatgtcacgcagagtgttgactgattggcattgaggcttttgagctgtaggtgggaggaggacgggttcagaacagacatccatcctgacctctctttttgtctggatcaggtctccctggtcttggggttggtgggaatacgtgtggggtggaaatacgtgtgcagtgacttcatatgtgttgctttgcagatggctttatagggaccatggcttctctgattcagagtagagagactcgcatggtaaatgtcctggtgggatgacagcaacatcatctaccctcatcctgccggaactggattttatgacagagcatgccacagagcactgaactttgagtaaaacgtcaggcatgagctccgggcgttgctgctctttggagaggtatcatgatgggctagtgtctcgtctcaattctttgaggctggaaagtcacattaacatacttatgatcatgactcttcaatgacccaggagaatgatgcaccccagaatgttagatttaccaattgataacaggacatgtccttgccacacaaatcataatgcttgtcctgctgttttctggcaacttactggtatcagagtcattggaaaatgtaattaaaattggaagtttgcttgatgaatacaggatcagggcagagaggtgtccttcagaggtatttttgtcgggcttaggaggcctatgggatcactgttgtctgcccaccaaacaggaactgtgctctcattctcaggtcactctctccattggaccacactggatacttcctttccagcacctcttttaggctcttgacatccagcatattttcttctcatccaggagttcctcctttcaacatacttttataacaaatccaagaacatggcttattttacatggtgctgctatttgagtttggctatctttaactcaaacaaaagacctatctggtaaactaccagggaggtttactttggaagctcaagagcatgtgtgacctgaggatccttgaagattgccccattttagtaaggggatttttccttttactaaaatcacccctgctctagatcttggggtctcttctgctttggggtctgactgtgcattgaccacaaagaagacacatctctgtttaagcgactcagtctagaaaaggcagtgtttcctgtctgcatagttacaggagagggaagaaagatgctctgggttgttaaggggacacctttgagcctaggcttccttttgcttgttgggaagttgtgtggaagaggtaggatttgactttaatgttaaaggatgagaataaggaagtttgacggccggagggaacagctacctaatatgtggccaagagaaagtgaacagttctggccagttctgacaccttgagtccttgctgcacgcacggcatcattgcagtcttatgtcccaagaccacagaatgtggagtctaaggtgtttagccgcattataatggaagagcgggtatcgtacatgagacagtgtctgcaaaaggccaccaagccagaaccagaaacttcttttgagaggaggcctgaagtaagttctcaggcccgttgaccggcatggatgcagaagaggtatcagtgagagaagcagcgaagcaagtcatgctgcattccctaaaggttgggagcaggcaagagggacaaattctgggcttctcacttctgcttggggagcccctggaaatgtgtaccaggcaaataccttagttgggttgaaagatgggttggaacagaagagggcctgtgtttttgtttgtttgcttgtttttcgaatagcttcttttcctagctgtatggattctgggtctcagggttgggggggagtctgtacccaagtcttctaggtagaaggctctctggtttggggtccttgctcttcagggtttgcttgctctgatggccctcagggggagggggggctccctcactgcacatctcgtgacttcattataccagcacctgtatgtcccaggtgactgtggctgggagccaggcacctagagaattgtctcattgtcattaggagatggtggcgttccatggccaaagagggctgatgtcatcactcgttttgcagatgagacaacagatttcttgggggttaagtgacttgtttaaggtcatggtggtggaaacagaactgaagtccagatcttttttttttttttttttgagacggagtctcgctctgttgcccaggctggagtgcagtggcatgatctcggctcactgcaacatccgcctcctaagttgaagcgattctcttgcctcagcctcccaagtagctgggattactggcgcacgccaccacgcctggctaatttttgtatttttagtagagacaaggtttcaccatgttagtcaggccggtctcaaactcctgacctcatgatccgcctgcctcagccttccaaagtgctgggattataggcgtgagccaccgcgctcggccaagtccagatcttctaacaagtgccgctgcccaaatagccctctgctgtggggtgcattttcctccatttcctcagttcttccttctaattcatcttgccaacggcaactaggctgatttttccaaaatactcattcatcttgtcagaaaacctgcggttattcttccctgctacagaatatacccaaggacgcacctgaaggcttgccattaccttgccctgtcgtgtactgggagggtggaggtgggcgagggtctcctccctccccagcccggcagctcttgctcatcctacccatctcacctcattccaagtccgatccagcctccaggcccagtcggctcacctggaactgacctctgacctcttttgtcatccatgccgcccatttttttctacttggtatttgtggcatagttacctttacatatgtttgttttacagtgatcctttcatatttctccaagtctagtggaatcttcaacccctcgagggcagagccaacagggtctatttctttatctgatcctacagccaacgtaatggagggctgtgggtggggactgcgtctgccttgggggtaggtgcctttgttcaggaggaggaagcttgaaatggcggaggctgcacctggaggccgcacctggaggccccaggagaggagtcaggtcttctcgatctgcagatgtttgagcctgggaatgaaggaattgctgaactttctgaaggagcgccctcgccgcgaccaaccttgcaaacaggaaaatgagaaatccagggaaggcccagagtgacgcaggggccctgggactcgaagcctgacctcctcacgccgcgctttttgaggcccccccgcttctctattcacctgtagtgtggaggcgggagaccccccaaacaatccccgatctggagcgctcccaatgcctgcgcgcgcctgctgtcactctccgtctgtgtgctgagttttcctacagcttcctgggcctcctatctgtaagctttttctttttttttttttggttgtgcttcagagaaactcacttttcacaactttctcccggctctcccaggccgtccgaaagctccggcttgctttcgcccggacccccggctccctccgggcaggcggctcgggagcagccccttccctcccctcccggccccccggccccgcgctaatctcttccagagctgggggaggggccaggcggtcttcccgaaggcggggcgctccctgcagcccggcctgggcgggccctgggaacgggcggggaacggcctcgccccccggccccgcgcccctcggaccggagaagaggggctggcccagcgccagcgtcggagcgccggccccctccccgggccgctcgcagccaaccaggccctccagcggggcccacgtgacctggagtcctagacaaagaaaatgttccctccctcccccccgccgcccccctcccctcccagtggccccctccgcccccagccccatcgcccccttcccctcccccaagacgggcagctacttccagagcttcagggccgcggctcacacctgagcgcgactgcagaggggctgcacctggccttatgggtaggttcctggacggagccccggggagaccgggggcggggaggcggcagggccggtgggaggatctccgcagccctccgggtttgaaaagagtgaagtatgcctccccggcccgcagcagccgcggcgtcccggcctggcccgagttctggagatgctgacttagtgctggcccgccgccttcctgcccacgagccccaaggccccactcctcgagggctccagtggcacctggcgccctcgggggacaggaagagcagccggccgggagcccgggcagtggtaactgcaggctggggcacgcggagctggtggcccaggagttgggttggaggcagcttcagctgagctggcagatgggtgcctggcacttccctggtgacctgcgtttctggctgggggaccacgcggtcctcagggccctgccagcttgcggcctcttaagagggacagcttcctctcctgcgagttcctggaagcctccaggcaggccgccagaaagaagtggtggggggcgggagagcacggtgcgaccctgacagggggccggcctgtgacaccagggtagcccaaggccgcatgggcttgggggcggtggcgctcagacctctgacctttggaatgggaagcgctgcagtcgcagggggaggtggaggcgggacaactgcctgaggagatgggactggaccggaggcagtagtcaccggagttcccggtggctttcccagtctggacggactccaggcccaggggcttccgtgagccagcagggagtggggaatagtgtggtgtctcttgaatgccgcctggtttctccgcccccctgggggtgagcagcccgcagcccaaatgcgagagcctcgagttcacccctgtttctcttattgtttgcctggggaggaaggcaggagtgcagagggaaaggggtgctttccctacgccccagacaggcctagtctagtgaggcccctcccccacccagctccggctgccccttcccctttcgtcaggccccctgctgctcacccacccccccccccgcttcttccttcccccaccccactgccccagtcctgatggaggccccttcctcctccgccagcccttaccgggccgggtgcgtgttctgcaccaagtgggctggggatgctgaacagctcgcagcgcggcatctgacaagctgggggaagttgtgggggaagaagaatgttcaggaactcgctgtgaaggggctgagagacaaaggggccgtgggggagtgctgagggtggtgtcaggcacgactcctagacctggggagccagaggaggagcccagcccacctgctgctgccgctgccaggaactgatagcgggtcctttccccttcccgcccactgctacctgcacacctcgtactggctcaggggcctcgccacgcctggaaacggggtctttggatcatccgaggcatcaccctaggtcagccacccatgcctgaagcttgagaaggcgtggtgggcgaggagcagcggcgtggtgtgggctcctctgcgagggtagctgacgcagctgaggatcccagcaagggaggcaccctcccccatagcggggtccacacttcagtgcaccttctcgtaggggaggaggcgatggctaattgatagtaggaaggggagggcagagttctggccaggtgagagtggggctagggagcgatgagcaattactccacattcttccacccccgcagtccgatccgtgagctcattccgccatccatgagctcattttcccagctgtttgggggttgggggcaaaggatgcattatcctgttttagaatttgttgagtcagaggaagaactaggacttaacatcttcagtgtttttcggaatcgccataagaaacagattggtctgtggcttggaggcaaagacttgaagactcagtgaaattaaatgaatctgtaagacaatacattggaccactgagcttcaaacaaaggttcttaacctgggacccttggatctggggggtccattgacaggctttgggagagtcctgggaatcattggtccatatatacaccagatttttaaacaggtcagaaaagctttccagaaatccttccgttcaggtgcctttttatgttggagcaactcctagaaaggactgctccaaagtcagctgctggttgtgaggctccgacaggaatgtagaggctgcaacttcagattagagctcttcttcatactccaggttgcttgctcatcctctttacccttgaggatgggtttgcattcgcagctctaggcccatgggggagctcttttgaaaggcatgtagaaaatggggttttctcccctctaaatctggtatggtggaaatgggtgcaaagccttgaagtcagagggccgtgtttcctagattcagtaaaaggctaatggttctcagagctaagtatcaaggatttcattctcctttgtagggatcctggagcgggttgtgagaaggaatgggcgcgtggatcgtagcctgaaagacgagtgtgatacggtgaaaggatggaggctgtgcaatgggagaataactggggtttggcttattaatttgttggtgggatggcagagagcacgcctggtctatagtgcctgctcagtaaataactgaatgaatacatgtatttatggatctgaagggtgcacatagaaggggtcgaatctggtaacaatacacactgggtgtgatccataagaactccagcatggcgtctgagcatgggaacagacaggctcttggggagcttcctatggtgtttgagcatgtgctggggggagatgggctctttaaacccagagcagtgatttcttcgtcagcagacatcacaaaactagaattgtggcctggaaaccaggaataggaaggattgattgcccaggggaattgtggagaagaagagagggtcccccttgctttttaaatttttggtgacagggtcttgctatgttgcccaggctggtcttgaactcctgggctcaagtgatcctccctgctcagtaactgggattacaggcacatgcctggctgaagatcctagtcttgattaagaagataggagagggtggaaccaatatctgtgtctaaacaatagtgcctgattaatatttggatagaattaacatctccataggtagggggagggatagcattaggagatatacggtataatgctaaatgacaagttaatgggtgcagcacaccaacatggcacatgaatacatatgtaacaaacctgcacgttgtgcacatgtaccctaaaacttaaagtataataataataaaattaaaaaaaaaacattaacgtaggctagacacagtggctcatgcctgtaatcccagcactttgggaggctgaggcgggcaaatcacctgaggtcaggagttagagaccagcctggtcaatatggcgaaaccccatctctactaaaaatacaaaaattagccaggtgtggtggtacatgcctgtaatcccagctactcgggaggctgagacaggcgaatcgcttgaacctgggaggtggaggttgcagtgagccgagattgcgccactgcactccagcctgggtgaaagagtgactctgtctccaaaaaaaaaaataaataaataacatttccgtatcatagggtaggcaaccgatatgctgatgagattgaggaagattagatctgggaggaaggtttcctaaaaggcagaaaagaaggctggaattgtgtgacttgagttcacctctctacttcaagtctttccatttttcacggcaaggcagctggttggctctctccagcccttgaccttctgtcactgttccgggttttgacaaacatggtccccttgagtgtcaggtggccttgctaattcctggagaggtcaaggtgactttttgttttttgtttccccaggctgagaagaaagccaaggtcattgcaggaatgaatgctgtggaagaaaaccaggggcccggggagtctcagaaggtggaggaggccagccctcctgctgtgcagcagcccactgaccccgcatcccccactgtggctaccacgcctgagcccgtggggtccgatgctggggacaagaatgccaccaaagcaggcgatgacgagccagagtacgaggtgagcggcttcttcaccagccgtggccagctctttccgggggccttccactgccagctcctcccgtcctgctctcctctctccatctcccacgggccgctcgctctctccacctgaccccgggcctcttcgtctccccgattttgctctgtcttgcctcattcagatggagctccctcctggctgtcctgccccccagatgcccagggctggggttgccatggggggatcagggtggcagggcctcgtgaccactgtgtaatgatttctgctccttggggctccaggacggccggggctttggcattggggagctggtgtgggggaaactgcggggcttctcctggtggccaggccgcattgtgtcttggtggatgacgggccggagccgagcagctgaaggcacccgctgggtcatgtggttcggagacggcaaattctcagtggtaagttgtggggtttggcagtagcctggggtgggggaaggttcttgatcccagggcctgtggttttggctgggggcagtctggaattggggtgatggaagtgggttctgctcacccctactctgcctgtggtgggtggaagaagctgtagggataattaggttgcacctgtggctcagagagctaggatgctggcccagttttagccttccaggaacctattcactagaattcctttccacctgcactcaggtacttccctactcttggtctggactcctctttgcatcgggtaattatttatcactgtatctggtcccctccagggctgagactgactctcgaggctcccagcccctgccagttgcaaggcatggggtgggtgcttgcaagtgtaagcctcggcaaacaaggcctggcttgtccccccaggtgtgtgttgagaagctgatgccgctgagctcgttttgcagtgcgttccaccaggccacgtacaacaagcagcccatgtaccgcaaagccatctacgaggtcctgcaggtgagtgtccctgctgggagctcggaggaggagcctagagcactaggaggcctggaagttggagtgcaggtcgggcttgagcagaacggaggcccaggaggcagcgactcctttctctccacctcgctcgcccgtatgcacatcccgctcctcctcagcggttcctccccatcttgcctgtgccaccctcactactcagagtctggccttgagcctgacccatctgccttccagcctgtcctgacaaccccaaccctggcgtgtcaccctccaggtggccagcagccgcgcggggaagctgttcccggtgtgccacgacagcgatgagagtgacactgccaaggccgtggaggtgcagaacaagcccatgattgaatgggccctggggggcttccagccttctggccctaagggcctggagccaccagaaggtaaatgagggcacccagctttctgggacccctgcccgccaggcagatccacaccagggctgggaaagccatgcttagggagggctgccaaggcctccacagaggggcccagtgggaacagccggggtctctcttgccctggggtcaggacttgaatgacctgctctctgttggttggctagaaccgtagagttgggaggtgggaacaagttggagaccaggccgcaccccactgtaaggagggtgggggaaggggctggagtttcctgtcagcctgtaactgaccttggcacctgctttcctcctccagaagagaagaatccctacaaagaagtgtacacggacatgtgggtggaacctgaggcagctgcctacgcaccacctccaccagccaaaaagccccggaagagcacagcggagaagcccaaggtcaaggagattattgatgagcgcacaagaggtagttggcctgcttctggagagggtggcaccaggaggcctgcatccgaggagcaggcgcggcctcctctgacgccagctctcctccccttgcagagcggctggtgtacgaggtgcggcagaagtgccggaacattgagggtaagtttgttgcctgggaactctggcactcctagtgtggcatggggcagagtagcagaggcacttaggaaggtttgaatgacatgggaccaggggccacgtcctgcgtgtcacaccaccttcaccgtgcttcgtgcactgtctgtctttctggtgccatgattctgctctcctgtcaatggcgtgggctggtcttcagggtgtgggactccccagtggccacagaagggcagcccctcttgggtgtgactgaactcacctacaggtcccctttcagcctttcacctttgctcacctctctcatcctggggctgtcgccctcagcctggtgctggtggatctggctcaggaccctcggcctgggaggattggggcaggggtcaggacttgaggattaccccgggaatccctcctgagtaacctggaaccagggctgcttctcatgagcaggtttctgtcctgctgtcactccatccctgtttgtggatggtggcattggtgctctgagatgatggcgttcgagactggggtcacagtgcctcccttttccgtggggcaccctggactcttttctggctgccgctctggcacaccccttttttgtggctggtctggtgctgggctccggcccggggagggagaggcccttcggtggtactcaccccatcccctccctctgctttccagacatctgcatctcctgtgggagcctcaatgttaccctggaacaccccctcttcgttggaggaatgtgccaaaactgcaaggtaggagcacacccacccaggagaggtgccgttgaggccggcccttcggccttctggctgactgtgtccaccgcttctgggcatgtacagggtgacacccggtgtgcgtgtgatgtagacttcagagcttcctctggaagcagagtcctgatgacacgggcccttgggtttcaagcttttgacttgctctcatttttctcctctgaaagattctttacctctctcaagccccattttagtccccagatgtggggatgggagcagagcagcggggacaagctcaggcagagtgtagcagggttgccgtgccctggggagcccaggagaaaaacccagggctgcaggaaggcccaaggtggtggtgcagccccctccctggccttgttctcaggctgctctttggttctgtccatggcggtgcacaggcagatgaggtttccccttcccagatctgcagctggggcctgaccctggctaaggtggtggcggggtcatgtcttcagggcttaggctctgtgaggccaggtgtggagcctcccttcgtcctggccgtcctgggacccgtcctggtggtttctgacccttcccgctgctgtctagaactgctttctggagtgtgcgtaccagtacgacgacgacggctaccagtcctactgcaccatctgctgtgggggccgtgaggtgctcatgtgcggaaacaacaactgctgcaggtgaggctgttgtggcctccagtggtctccttagctgggccccaggctcccgccgcccaccgcctcccctcctctcccttccccacagaccctccaccccctagccatgctccagacccggtctttccattccaggtagcacaccttggcctccccggaccagggctgagagtctcctctgctcactgggtctccttccaggtgcttttgcgtggagtgtgtggacctcttggtggggccgggggctgcccaggcagccattaaggaagacccctggaactgctacatgtgcgggcacaagggtacctacgggctgctgcggcggcgagaggactggccctcccggctccagatgttcttcgctaataaccacgaccaggaatttgtgagtgctgggcctggggcgcggtctcgagctcccttggctgagccttggttgtggggcctgagctgtgcgcagggtgtgtgggtctaggagcctggctggagggccagcgctgggtgggagcttgggacaccgctgggcctgcatctgacctgttgtgctcactgcttaggaccctccaaaggtttacccacctgtcccagctgagaagaggaagcccatccgggtgctgtctctctttgatggaatcgctacaggtgaggggtgcaggcccaagaggtgctggccgccttgtcccaggatgggggagccaggtgtgtgggcaactctggcaaaacgaaatgatggttagcttcacagctgttaaaatattatcccaaaggggaagcttgtgtgtgaagtggaaacgtatgcagtccgtggacttagatttgaccaaaaataaaaaagtaaaacaggtggtaaagcagcctgcctgctgggcgcttccttagtaaggaagattcagccacagaggccgagtgatcattagtcagattcacagagatttcacagagcctcaaaggacagattcagcaagacagaaacatacacagttctgttgtgttttgattatacacaagatagtctaaagaagacttatttaaatcacccattatccttttattaatattttggcatatgtccttttcagatttttttctgtgcgtttgtgtttatataaccatacatccatagatagataaattaagtgggtagtgaatgcacacggttttgtaacttgccttgcatttattatattatgattgctttttcatgtcaagcgatataaagctacatttttttttttttttttgagacggagtctgttgcccaggctggagtgcagtggtgccatcttggcccactgcaacctctgcctcctgggttcaagcagttctcctgcctcagcctcccgagtagctgggactgcaggcacccaccaccacgcccagctaatttttgtgtttttagtagagacggtgtttcaccgtgttggccaggctggtctcgatctcttgaccttgtgatccgcccacctcggcctcccaaagtgctgggattacaggcatgagccaccagacccggccaaagctacattctttatttgtaagtgttgcgtaaggttccattgagtcaaagtgccgtaatttatttaacgaacccctattaggtcatttactattttttttattattattataagtagtgctgtgacaagcatcctgatagaatatatacttgaaccattccctccttaggaaaacctttaggagatgctgggtcaccctgcaggcattgtttgcttcatgtgactctggacactgcagaaagcgtcctaggagattgtgaagacacatccacccctctgccctgcccccccagccaagggcttcccggcttttaagaaaggaatagctcttcttagaattcatgtctttggccagagggagataggcagtctcaacccagggaccctggttagagggtgaggcggaggggatggcttccccggccagatgtttgtcttctgttctcagctccatgctgctcttctgtaaacctagagaagttcatttacagctttttgtatcccagactggaaccttgaggccttcttaaatcatgtcacaccccaggaggctgtaaaagctccttggctgggggacatgttgggagcagcagaaacagtgccgtaccctgtttctcccgagaccctctcgggatctgctctgattgtttccttgcctcagttcggctagcatttctggagggggagggatcgtggtaaggaaatctgtgtggttagctcgggggaagcacaatgaaggaggcctcctctgtctggaagagcctttgcaatccacgagagggctgagtgaggaatggaaactgctctgatggggaggcaagggatgcacagagctggggactcatagcggagggggcggtgattccaggggctactgggtggggcagggcatttatgaaacctttgtggagcagggaacattcaggttgagtcaaagggtggggtagaattgtagcaggaggtgataagagggtatggaaggaccaagttgtagacggacaacaacaaagaaaaggcccccaaaaagtcagctgtgattcttcctggatcctggaaccatgtactctccggtcagttttctgcagctttgactgccttccagataggccaaacgaggcatgagacagagcctcgatgtccttactatggatactccagttggatccagaaaggatttaaggcatcttcagggaaaagataggacttgggcctacagctgaccccatgggtcctgttggccagcaggctcacctgccgagaccagggtgccagggagatggctccaagtaacggtgctgtctgctggctggtgcagggctcctggtgctgaaggacttgggcattcaggtggaccgctacattgcctcggaggtgtgtgaggactccatcacggtgggcatggtgcggcaccaggggaagatcatgtacgtcggggacgtccgcagcgtcacacagaagcatgtatgtccatgctgtggggcgcagcccgtcttcccctccctgcacactcagcacctggaggcagcccttgcctcctttcattttgttcatttgccctctttctcttcaccctttgccccagcctctttttctccttatcttccatttgtcctctgtcttgagagggtaaagggcaaattgaaatgggaatttgggctaggcatggtggctcatgcctataatgccagcactttgggaggccaaggtaggagaatcccttgaggccaggggtttaagactagcttgggcaacatagtgcctacttgagctctggctactccctgggctggtttctggacagtttctagtagagctctttggattagagagaggttcctgtcctcccaatacttttggcaaatagctttatcagcttccatatctgggaggctcaggcagggtcttcccttaagcatgactacaggccctctggagtcctgaagggcaactggaggacattcacatggcccagacaccctgcctaagacactcagcatgccaggtaccttcagactcagccgtccacttgggtcaccttcccagtgggtggctgtgttgcctgcctgggtgatactagtttccccattggcctaagaaatgatccaacttggtcccgttcttgtttaggacttgtccatggttgcagctagggtcgtgagcctgcagagcagctgggtctcctctctttcgtgtcaaaggacttctttgccaagttcacagataatttctctttcttcctgtctgcctctgtccctggacagcaggcccatcacgttgcctttatcctcccagatccaggagtggggcccattcgatctggtgattgggggcagtccctgcaatgacctctccatcgtcaaccctgctcgcaagggcctctacggtaggtaccatcctgtcccctccaccttctcagctggtgcttccgcacataggcttcctccttggatatttctgccctgggacagctattcccgatgaccctgtcttcccgtgccctccccgtgcccgagccacaccactgtcctatgcagacagccccagctgatggctttctcttccgacctctcagagggcactggccggctcttctttgagttctaccgcctcctgcatgatgcgcggcccaaggagggagatgatcgccccttcttctggctctttgagaatgtggtggccatgggcgttagtgacaagagggacatctcgcgatttctcgaggtatagccagcaaccttggtttggccagctcactaatggcttctaccttggactgctgcttcatcctgtctcatctgcattgtggagctggggactggtgacttctgctttgcaaggggcctgtttgggaagccccaggcttcctggatagaaagggaggaagcagggttagaggcctacctcggaaagaaccagtggtctcactctaagaggtggcattgtgggtgtggacctccggggttgaaggacctgtcactcaatcaggtggggtgccagactcctggggttgggtattctgtatggtgtttgttacacaccaggatctttgagaggacaaaatcagttttccctgagcaagaagggcctatcctcactccctggtaccatgacaggcacctgagaagaaaacaagacttagctcagttttcattccttatcatgtgagtccccgtttaaccctgagccaagtctgagccgcgtgcagagggcttctgctgccagaggcgtgcttggagtggcccttctgggagcttgagcccacctgtgctcctgagtcttggggtgggtcacactgtgagctggtgttctgactgtaagtgtgagcaggcgtctgtttgagttctaatcagggctcatggtaaacacacccatactcgctggagcctgggctctcccagcctctgggtagtctagagcagcactgtgcaatatggtagccaccagccacatgcggctgtttacattaacattaaccattcagctcctcaatcacattggcctcattttaggtacaaaatagccacctgtactagtgggctagtggccactgaattgaacagtgtagaggacaacccaccatcgcagaagttcatttggacaatgctgatctagaacgttccagtgacagcttgtggaatgtggctaggtgtaattccagcttctcctggaggctgcaggctagcccagtgtgtggctcctgagagagaagtaagaggctttgaggctttaaggctcgaccccagcagcatgccggcgctgtttcatgctcctccttggctcatcttcaaaccgtctcctgttttgtagtccaaccctgtgatgattgatgccaaagaagtgtcagctgcacacagggcccgctacttctggggtaaccttcccggtatgaacaggttggtgaaagctcctgggcctggggggctgtgggctgggactgcaggtgggatgacccatagtggggaagcccctgagccgggccctctctggccggcctctgctgaatgactagctgctctgccatgttccttatttccttttccttgaggaggaagaggagtcagggtatagaaaatactcgtctgaaaccaacaactagtggtcttaaagcaggacctttaaaagtactctctttataccaaagaagagtcctgtgctgctgagttaggtagttggttttctgacattggtgatgtgtcccgagccctctggttcttagattctcctgaggcaaagccatggggcatggctttggggctgggaaggggagttgtggccacagcctgttccaggagagggaatcttgcagcggctgcatgcaagttcagggttctgcttaacttaattttactaatcacacactttgttggcttcaggtccttttttggagagattttcttcagttaggttacacagataaagattttaatatctaggaatgaagaaaattcatttcatcagttataaaactggcattataaaaaggctttttaggcgaaataaattgtccagagttggcaattcaaaagcatgctgagagccgctcagtccctgtccattgtggagggaagcgttttccagagtgttctgagtcatgggtgttaaacctccatggtgggctgcttggtatacttggtataactaggagacatcatttcacctggcctcggtcaaataatctccctccttgctattcccatgaggttgtaggaccttccccatctcatacatgtttggtagagttgctatcgagggcttgttgaggggaaggagatggggcattggggcagctggcctgaaactgtcccccgagagttcccaagatacatgtgcatattgggaaatggatgggctaatgaggtccagtattttcatggaaccactcagtgtctcccgacagaccttggtcctgtgggatttctcgcctgcttctttcaactctaaaatactaaactctgagcttctaggaggagcagaggtcctgcatgcagggccgactgggcagtgcacgcataaagagtcggggacatctgtcgagcacctgatttgactgcaggccccgtggttcccacactgagatcctggagccagtgctcagggaagccttccttaaatatccttacatgtcagaaaaggtcagcgttgaaggggacagccagtcagttatgtggcctgcaccctgagaagtgacatatttaatgtcacagaatttttggtctttagggaactgcagaatttaagtctggttttttttttttttggagacagagtcttgctctgtcgcccaggctggagtgcagtggtgccatcctggctcactgcagcctccgcctcccaggttcaagcgattctcctgcctcagcctcccgagtagctgggattacaggcacctgccaccacgtctggctaatttttatattagtagagaccgggtttcaccatgttgatcaggatggactcaaactcctgacctcaggtgacccgcctgcctcagccttccaaagggctgggattgcaggcatgagccactgcgcctggcccagaatttagtcttttaaagcagtacatttaaggcttgcggtttgattaatttcatccagtggacacacccgtgtaacaatcaccacaaatcaagatacagaacattgtcacccccaaagcttgcttcgcagtgggacgcttaaagctcagtgtattttagactaactgatgtaaagatagctgtgctttttttttctttttctgctaggtgttatctgcctgttcacaatttgagaccacttttgaatttacctttaaggattaacgcttggtggatttgtgtctttgcatggctgcagtgtgtgttcgtgtgtttgcggggagtttgaagagagttatgacgtgtgtgcgtgatttggggaaggggctcttaccctgtgaactagtggctgctgggggagggaggggagtcgtgcagctggggcccttcccgctgttatccaggtttctgttgttacagtctctcttctgcctcctaggccgttggcatccactgtgaatgataagctggagctgcaggagtgtctggagcatggcaggatagccaaggtcagctccagcgtctagaacctctgctggggggcagggagaaggaagggcaggatgaggtggagcggtggccagggccttgtcccgcctgcttctccagctagtgtggagaatgcaatttaggagacggtgcagggtcatgcagcagggcagccagaggagggcccagggctgctggccttcagcccttcctccctggtgagtgtcgcccatcacccccggtagacactgaggagtctttaccaagacctggttgtgctgtggcttttttttcatttttaaattttttggccaaaacctattacaaaagccctcaaagcagcctcctgtgatgtggaagctccatttctctctggagctggaatctcccggagtgactacctggggcactgggttctgtgtcagcaggttccagcattcagaaccactggcagctccgagggcatctttgagcccctcagtaacttggcatcctttagcctacaagttactccatctctgaaagaactaattctttggaagacttggaaagtacagtggctacagcttctacttctaaagtctgtggctaggccgggtgcggtggctcacgcctataatcccaatactttgggaggccgaggcaggcggatcacctgaggtcaggagtttgagaccagcctggccgacacggtgaaaccctgtctgactaaaaatataaaaattagccaggcatggtggcgggcgcctgtagtcccagctactcaggagtctgaggcattagaatcgcttgaacccgggaggtggaggttacagtgagctgagatcgcaccactgcagtccagcctgggtgacagagcgagactccgtctcaaaaaaaaaaaaaaaagtctgtggctagatggatctaagattggccaggtgacctccaagtaggaagaaaagtgaggctgtggggtctgtggaggctcctgccctgcgaactctgctcactcagagccatacccagccccctgggtggaccaggccctgtcagggtttggcgagtacctggcatatttggtagacgcatgaccagtgttggctggtgaatgaattcgtgcttattcctcttttctcctcttcatctagttcagcaaagtgaggaccattactacgaggtcaaactccataaagcagggcaaagaccagcattttcctgtcttcatgaatgagaaagaggacatcttatggtgcactgaaatggaaaggtacccgggttgtgctggcatctggctgcggtgtggctgttctgattgctgtgcttgctgcgggggtcctctgcctttcccacctgacttgttttccacaaacgtcctgggaacagtgggttttatcaagcatttcccaacatggcagactcctggggtggactcctgacaccccaggctcctgggtattttaaggctggtcccaagtaagaggagtctaggggccaggagcagtggctcatgcctataatcccagcactttgggaggccgaggcgggtggatcacctgaggtcaggagttcgagaccagcctggccaacatggcgaaaccccgtctctactaaaaatacaaaaattagctgggtgtggtggcgggtgcctgtagtcccagctactcaggaggctgagacaggagaatcgcttgaacctgggaggtggaggttgcagtgagccgagattgcgccactgtgctccagcctgtgcaacagagagattccatctcaaagggaaaaaaaaaaaaaagaggagtctaggaaatcccctgctgccttgtctcccagagaccctgctgatcccccagggaaccactgcagtgacaggaccttaacttgtggtgccaattttataggtcttttgtaaaccaagccagcatagggccaggcagacctcgcagcctcaacaccctgatttgatgcaaatgggactttcggggctggatgaccttcttgttctctgagtgtaactaggatttagccagacaaagagaccatttacacaaacaaccagagcaaacaggaaatccttcagcttctgaagtcaggcaggagttcggctcctttttcgccttccctgctcttgatggggaggatgctagggctacgtgttcgttacatgcagactccaggtgtacgttgccgagctaaccctgcaggagaggagaactagagagtgtgtcctggaggtatttctgagggattgttcaaaattactcttatttctgctgggttgtgaaactctaggcagtgatgaccttactacctttaaggtcacagaaaccagcacagtgcctggcacatggttggtgatctgagtgccgggttgtttataaaggacagaagattcggcagaactaagcaggcgtcagaggagttggtgggtgtgagtgcccctgtccctgcacttcgggtggctgctggtcctccgggtcctgctgtgtggttagacggcttccgggcagcctggtctggccagcactcaccctgccctctctgccttttctcccccagggtatttggtttcccagtccactatactgacgtctccaacatgagccgcttggcgaggcagagactgctgggccggtcatggagcgtgccagtcatccgccacctcttcgctccgctgaaggagtattttgcgtgtgtgtaagggacatgggggcaaactgaggtagcgacacaaagttaaacaaacaaacaaaaaacacaaaacataataaaacaccaagaacatgaggatggagagaagtatcagcacccagaagagaaaaaggaatttaaaacaaaaaccacagaggcggaaataccggagggctttgccttgcgaaaagggttggacatcatctcctgatttttcaatgttattcttcagtcctatttaaaaacaaaaccaagctcccttcccttcctcccccttcccttttttttcggtcagaccttttattttctactcttttcagaggggttttctgtttgtttgggttttgtttcttgctgtgactgaaacaagaaggttattgcagcaaaaatcagtaacaaaaaatagtaacaataccttgcagaggaaaggtgggagagaggaaaaaaggaaattctatagaaatctatatattgggttgtttttttttttgttttttgttttttttttttgggtttttttttttactatatatcttttttttgttgtctctagcctgatcagataggagcacaagcaggggacggaaagagagagacactcaggcggcagcattccctcccagccactgagctgtcgtgccagcaccattcctggtcacgcaaaacagaacccagttagcagcagggagacgagaacaccacacaagacatttttctacagtatttcaggtgcctaccacacaggaaaccttgaagaaaatcagtttctagaagccgctgttacctcttgtttacagtttatatatatatgatagatatgagatatatatataaaaggtactgttaactactgtacaacccgacttcataatggtgctttcaaacagcgagatgagtaaaaacatcagcttccacgttgccttctgcgcaaagggtttcaccaaggatggagaaagggagacagcttgcagatggcgcgttctcacggtgggctcttccccttggtttgtaacgaagtgaaggaggagaacttgggagccaggttctccctgccaaaaagggggctagatgaggtggtcgggcccgtggacagctgagagtgggattcatccagactcatgcaataaccctttgattgttttctaaaaggagactccctcggcaagatggcagagggtacggagtcttcaggcccagtttctcactttagccaattcgagggctccttgtggtgggatcagaactaatccagagtgtgggaaagtgacagtcaaaaccccacctggagcaaataaaaaaacatacaaaacgtactggtgctttcctgtctaagtcgccttttgtgtgttcttttatgaggcccccaccatccacccctctgtgcacaaggcggctcccggcccctggaatgtgatgtttttggtcatctccaaaggctgcagttttatactgggaggctgatgacaccttttattataattattcttatggttctggttataattatgtttgttttaagattttctttaagaaaacaaaaacccaacacccttccctttaggtttcaaaccaaggtgcgggagcagggtgcttctgagttagcggtggctctggtgccctggctcccacccctcgggccaggtgggccactgggcatggtgacagctgggcggccagggagtccccaaggtctgccttctgggcttgtcactcttctcttctacttcccctcctcttgagtcgggtgtgtcagggctggagggaggaccggccgtctctctccttgtgtgtgtgattggagtggtgtgtatttcttttctagtacttggtctgatgatagctgtgctcttacctcgagtcagcagcacctggagccccaagtgctcaacactttgttctacttcctacaaggcaggcggcctggcgtcagtagtaggaagggatggcattgttggctccagggtgagggcccgacgggcaggtgcttgcctgggtagatggggtgtagatatgtggcatatagagatatatattttataatgggaggggggatggcacctcctgggactggtagagctgggaggtgtgtcggcaagcacatggccccaagtccacgtccctagaaagatggggcctacagtgataggcgctctataaatacatagatagggtcatgtttaagaaatattatggggtggggagtgggggaagcaggcttagtgtgctgagcctcggtccccactgcagacctaaaccccacaccaatcagtcaatctcacacgcatacacaggagcatatttctgtactgatgcataatgaatgcactcacacacacacacacacgccagggggctcccagcactcttctcccagggttcaggactttgtggagtcagcccgtgcagctatttacctctgttgccctgattgcaggtagactgtcaatcccagaagttgctaggtgctgaggcaggaaaaggaggaggtttcttttagcaggtgctctcctctagcaggtagtgttctatctcttttgcccctggtgatgtcaaaagattcttctgttagcaacctgtgatactgacctgcaactctaggcaccagtcaagtcagccctcaactccccctacctattctccccaactgaaatcaaattgacatccaggtctgtcttggccagggggcttccattggggaaaaaaaatgggacagtgaacctcacctattgaataaaccaaattagtaattagtgacaaaaccaaaccaaggctttggaccccctgctcattactcaggagtaaattcacacagctggtggccggtctcacccctttttggggtgcttggtcctggaccccaatctactgtctcctcgacagattggtgtttaagatcatgcccagttgcttcctgtcacctcttgacaggtggtgactgggctgctgtggggctggagcagcgaggaagggagcctctgccccctcagtggagtccctgtgctaactgtggtgctcacccagctcctccttgctcccgcggggctctgtccttcgggcctggagtccaccagcgccactccaggagggctgggggaggaggggctgcctcaggcagtccaaggtgctccctcccccgctggccaatgctaaggtcttcccggctcccagggtcaggacagagtcttctaaggctcaggctctcccaagccactgcttagtgacagttagcctttcccagcggcccaagctccaccggaactgggcctggtgctccaaccaaagggttggtgttgggacttgggaagagacttggtagccaagggcatggcaagcctgggggattcctgtgggccggcttgctcgaggagggagtgctgggcacagaggagcccttatggctgacagcttgagagcacttgttcctccagatctagccacttgaccaggccctagaatggaccagatgccccaggggtcatggcccccccccccccccccttgcagggacgagagttaacaatcaccagcttttcttccggcccagcctgtgtgcttggtctcacagtagaatttaggagagtgtggggctttgggattgtgccaacttggccaagctgagatatgcttaatccacctcaacgctggggcctctggggacaggtattgggtcaccttccaaggggtgctgaacttcagcaggctgtagataaggcagaggttagaggcagtggagtgggggaaccaagaaggcctagggaaaattgccaggcatattccctgtggaattttctttccgaagagtaggcccatttcccccttagaaacaagggttctgggggctgatgacagcttcccctgcaggtgccaggtggcgcatgatgccaaagagatccgtggctcttgcctgggggaggtagccaggtgctcgtgctggggacacagtccttggcctcctgcctaagcaggaagctagtttccagcaggcggctggtactaaccccccgccccacgggagcgacaggctggtgcaccggcagactggggggccgcaggcgggcactagcaggggtctgcagtccatagatgatgacatgaatctgttgctgtccttttgtctctaggccccagagacttcttgctattgaacatcctattggaaagcaaactttccaagagagcacccgggacctgttagcttttgaaacaggcctgggtgtgattgactggtagagatgcctgtgtgatttttggcgcattgcaggagtgtggattgggacaggcaccccagcaggaaggaaggctgacaccaaaggggtctcacagggcccagctccccttgcttcccgataattggccaccaggccatggcgactctggggaagcctagatgggaacacccaccttctccagcagtagaaggaatatttcagcagagccatctgggagatgttcttataggaaaactgcagtcattcatttcatagttttgcttatataaatagagtacatttgggaggcagttttgaattcctgttgctactctgcttggtgcggagttgcagtggccccaagtgtctttcagagctgttgcttttaggatccccctcaagctgtgggttagggccagggcagggagggggtgctgcctggcactgtgccctgaagagggctgcttgcttcctttggtcgggagcacggcagagccaacattctggtgggaaccgagtttctagccaggcccctgttttggtcccgggaggtgagtaatctgagtttgtcattgcgtattctccacgctgcctgctctcagtgctggagactagagagcgaccctggagttgtcctctgggagtcctgcctgtttgccagggagcagctgaaacctccccgctcccaatcccgggggtggaaaaggtgtagtggaggaatggtctggagctgggatggcccttctggccatgccctgctgagccaggattaaggaaagtgtcagccgcctccttaccaggccctgtgctggggtcaggaggaccgggaggagagggaaggggtgagaggatggactctgctgttgtagtgtgagctctggaatctttacgttttggtaaaggcaggccagggtctttgaggatcgagttggggaaccttgcctctgtgtttccgagacccagctaaggtgggcctttggtgggtgacctgtctctgacccgaggcagcagagttttgggggagggagaaacaagcaaggagcagggaggacaaggacacaagatccctttgctggtggtgacttactcacttcccccaccagagggcctgggactcccgaaactcccgtaactggaaagctccctggctcagctccactggggggtgaggagggcggctccctcagccccagcctagcggcctccaaccctgtgcctgagaacatgagcagcggtctaaagcatcccctagtcccatttcacttcacagaccgatttggttgcacagccctagaattcaacagacaacaaaaatgctgaaattccttagaatacgcagagggaggaggtgactcaccaaggtgctaaaacattttattaaaaatatatattgttaaattaagtctgctgtctggacaatgactgtttgttttgttttcttgtagtggagtttaaaagagactattattttactctgatatattattattaaaaaggcattttaactttgtacttgaaaactaaatgagcgatttcatgtgttttagctgaggcattgaagtagcgggtgcttacttatttgtgggaaatcatgtattcatactgaagaataaactccgtagctgatttggtaataacttttactgttacagacgatttcgctttgaccccggtggcagagcacttttactccacattccacgcagctaaatgcaggacttcccagactcttccctccccagccctctttcctttctcttaagttcctcttttctcctttattattattatttttttttcctggttccagcatcctttcaccactgtattttttttttttttttttttttttttttttttttttttttttttttttttttagggttgcttctctatttattgacaataataatgtacatttcacagtctggttctaggacattcagggaagggcgagtgggggcccgaggggtccctgccccacccgcctggtgtcctgttgtatctctgtgtaagtgatgctcgtgacatagctgtttatgaaataattaaagaggtcaatgcgtacaacagatgtagaaagtctgtcagttccgccttcatcacatttttttttgtgcccagaagaatataataaagctcctttctaatgtacttgtgctggagaacacttgaataaatggactgtttttgtgcaaaaagaaaaatggaaaagcaccgtaataatgtcgttttgtcttgcgtctcctttccctgccatgactgttcacagcctcctccagggggctcaagtacctaagcggggaggtgctagcgtcgggcccagatgatgtagggcctccctaaaaaacgtcacctgtgtgagcatcaaattagtaaatgggagctgtcccctgggtgcaggaaagagtttggttgactggaagctgaaaaataagttatggtgagacagggttgctgggaaagcaaattcagctctgggctgagcaacagaagttttcataccagagcagggagaagagcgcgccttatgccaatgccttggtcagacacggcgcgaggaggatttttgaacctaggtactcaaactctaaacagggttttggcaacaagcgagcatccagagtggtagatggtcgggaatgtcaaggggccccagaacaaatcggggcatttgtcctagaaaaagcaggaattggtaggccaatgtttgtaaacacggacagggcgagcccaaagggccggggtctttccaggtgttccacaggcaggtggaatggtgtgggggaagccagtgtcagctcagcataaggggagggaggtccctttccctgctccagccaacaatgcaagggccaccttgagtgcagtgacagccactcagggatacccccagttttcccttcagaccccaagtctgagttcctctcactgtatggccctccccagagctgtcttgcaagtggacagtgcctcatggtctgcagagcccttcacccagtgttccctttgtctgcatgactcaataatcactagttctctgtccccacctatctaaagtgaccatctggctgggcgcagtggctcatgcctgtattcccagcactttgggaggctgaggtggatggatcacctgaggttgggggttcaagatcagcctggccaacatgctgaaaccgcatctctactaaaaatacaaagattagccgggtgtggtggtgcacgcttgtaatcccagctacttgggaagttgaggtaggagaattgcttgaacctgggaggtggaggttgcagcgagctctcattgcgccactgcactccagtgtgggctggatacagagcgagactgtatcaaataaataaataaataaatgtgaccatctgaataaatgcaagaactgggatgattcataccacatctcaactctaagacctcaagcatctgtgtttcagtttcatcttctaagtgcctagcaggtctagccagtgcttgcttctcttaaagaagggttacttggctgggcatggtggctcacgcctgtaatgccagcacactgggaggccgagggaggtggatcacttgaggtcaggagttcgagaccagcctggccaacatggtgaaaccctctctctactaaaaatacaaaaattgtccaggcatggtggtgggcacctgtaatcccagctactctggaggctgaggcaggagaattgcttgaaaccgggaggtggagattgcagtgagctaagattgtgccactgcactgcagcctgggtgacagagtgagactctgtctcaaaataaaaaataaaaaaaagaggaagggttactcaaggtttctctcttacattaggtttcagggaggtttaggactgtaccacttcactggaagtattgaaagaaattataaggggaacgtttgaggaaaaggggacaaccctactaaactaacaggttttttcctcatgggcacgtctttcttttttcacaaagttgtaactatacatttaacttgtactttttcttagtatttttcagtgttgatgtagaattatttttatttcaatagtttttggggtacaggtggtttggttacatggatgagttctttagtagtggaatttttttttttttttccgtgagacagagtctcgctctgtcgcccaggctggagtgcagtggcacaatctcagctcactgcaagctccacctcctgggtttacgc

SEQ ID NO: 33 - DNA, 1737 bp, Homo sapiens
cggcggcggcgagagcagaggacgagccgggacgcggcgccgcggcaccagggcgcgcagccgggccggcccgaccccaccggccatacggtggagccatcgaagcccccacccacaggctgacagaggcaccgttcaccagagggctcaacaccgggatctatgtttaagttttaactctcgcctccaaagaccacgataattccttccccaaagcccagcagccccccagccccgcgcagccccagcctgcctcccggcgcccagatgcccgccatgccctccagcggccccggggacaccagcagctctgctgcggagcgggaggaggaccgaaaggacggagaggagcaggaggagccgcgtggcaaggaggagcgccaagagcccagcaccacggcacggaaggtggggcggcctgggaggaagcgcaagcaccccccggtggaaagcggtgacacgccaaaggaccctgcggtgatctccaagtccccatccatggcccaggactcaggcgcctcagagctattacccaatggggacttggagaagcggagtgagccccagccagaggaggggagccctgctggggggcagaagggcggggccccagcagagggagagggtgcagctgagaccctgcctgaagcctcaagagcagtggaaaatggctgctgcacccccaaggagggccgaggagcccctgcagaagcgggtgagtcctcagcaccaggggcagcctcttctgggcccaccagcataccctgagagtcagggacttggctctccagcaggtcccaggaaggatggtctgggtcgtggctaaaggtctgcttgccaaggctatggcctggaggctactggctggatgcagcctgcgcatatgttttatttggcccatagagtgttttaaacatttaaaaaattagttgccagtatttaaaaatcaaaaaatttcacataaaaatctggagttttggcttctcatgaaaaaaaaaaaagctagatctggcaacagcgggctttcataacgccaacgattgctagactgggataatggcggtccctccatcgccttctgtggctggttgtgggccttagttttctgcagctctacctggcctgcttactctcccacgtgccatgcagttcctgggggttgctgtatttgtagcccctggcctgggcactcaagggcagcagataccctgtttgcctccctgagtgcagaggtcctgagcccaccctagttgggctgactcaactggaaatttggttgtgacagtggcgtggggagagggctgggtgattgtattctgtgtactgcccagcccaggcctcttcatctggggactttttggcctaaccctggaagcctggaaagttgcccacttttctctttcaggttaagccagcaatttcagggccaaccgagctgtaaacatgttagtaatgaggacaactagcatttgtacagggcttcacagtttacaaagcgctttctcatacattatcacatttgatcctcccagggccctgccaggttgttttgcatatgtgcattttaatttcaaaaagtcttccttccaagcgtgtatgatgaaatgagtaaattgattaattggcgtaacttattttgcatggatccaacctaatgttcatgcaggatagagaacatttccagaatacaaatttccaaacttaaaaaaaaaaaaaaaaaaaaaaaaaaaaaaaaaa

SEQ ID NO: 34 - protein, 166 aa, Homo sapiens
MPAMPSSGPGDTSSSAAEREEDRKDGEEQEEPRGKEERQEPSTTARKVGRPGRKRKHPPVESGDTPKDPAVISKSPSMAQDSGASELLPNGDLEKRSEPQPEEGSPAGGQKGGAPAEGEGAAETLPEASRAVENGCCTPKEGRGAPAEAGESSAPGAASSGPTSIP

SEQ ID NO: 35 - DNA, 3638 bp, Homo sapiens
gatctccgcagccctccgggtttgaaaagagtgaagtatgcctccccggcccgcagcagccgcggcgtcccggcctggcccgagttctggagatgctgacttagtgctggcccgccgccttcctgcccacgagccccaaggccccactcctcgagggctccagtggcacctggcgccctcgggggacaggaagagcagccggccgggagcccgggcagtggctgagaagaaagccaaggtcattgcaggaatgaatgctgtggaagaaaaccaggggcccggggagtctcagaaggtggaggaggccagccctcctgctgtgcagcagcccactgaccccgcatcccccactgtggctaccacgcctgagcccgtggggtccgatgctggggacaagaatgccaccaaagcaggcgatgacgagccagagtacgaggacggccggggctttggcattggggagctggtgtgggggaaactgcggggcttctcctggtggccaggccgcattgtgtcttggtggatgacgggccggagccgagcagctgaaggcacccgctgggtcatgtggttcggagacggcaaattctcagtggtgtgtgttgagaagctgatgccgctgagctcgttttgcagtgcgttccaccaggccacgtacaacaagcagcccatgtaccgcaaagccatctacgaggtcctgcaggtggccagcagccgcgcggggaagctgttcccggtgtgccacgacagcgatgagagtgacactgccaaggccgtggaggtgcagaacaagcccatgattgaatgggccctggggggcttccagccttctggccctaagggcctggagccaccagaagaagagaagaatccctacaaagaagtgtacacggacatgtgggtggaacctgaggcagctgcctacgcaccacctccaccagccaaaaagccccggaagagcacagcggagaagcccaaggtcaaggagattattgatgagcgcacaagagagcggctggtgtacgaggtgcggcagaagtgccggaacattgaggacatctgcatctcctgtgggagcctcaatgttaccctggaacaccccctcttcgttggaggaatgtgccaaaactgcaagaactgctttctggagtgtgcgtaccagtacgacgacgacggctaccagtcctactgcaccatctgctgtgggggccgtgaggtgctcatgtgcggaaacaacaactgctgcaggtgcttttgcgtggagtgtgtggacctcttggtggggccgggggctgcccaggcagccattaaggaagacccctggaactgctacatgtgcgggcacaagggtacctacgggctgctgcggcggcgagaggactggccctcccggctccagatgttcttcgctaataaccacgaccaggaatttgaccctccaaaggtttacccacctgtcccagctgagaagaggaagcccatccgggtgctgtctctctttgatggaatcgctacagggctcctggtgctgaaggacttgggcattcaggtggaccgctacattgcctcggaggtgtgtgaggactccatcacggtgggcatggtgcggcaccaggggaagatcatgtacgtcggggacgtccgcagcgtcacacagaagcatatccaggagtggggcccattcgatctggtgattgggggcagtccctgcaatgacctctccatcgtcaaccctgctcgcaagggcctctacgagggcactggccggctcttctttgagttctaccgcctcctgcatgatgcgcggcccaaggagggagatgatcgccccttcttctggctctttgagaatgtggtggccatgggcgttagtgacaagagggacatctcgcgatttctcgagtccaaccctgtgatgattgatgccaaagaagtgtcagctgcacacagggcccgctacttctggggtaaccttcccggtatgaacaggccgttggcatccactgtgaatgataagctggagctgcaggagtgtctggagcatggcaggatagccaagttcagcaaagtgaggaccattactacgaggtcaaactccataaagcagggcaaagaccagcattttcctgtcttcatgaatgagaaagaggacatcttatggtgcactgaaatggaaagggtatttggtttcccagtccactatactgacgtctccaacatgagccgcttggcgaggcagagactgctgggccggtcatggagcgtgccagtcatccgccacctcttcgctccgctgaaggagtattttgcgtgtgtgtaagggacatgggggcaaactgaggtagcgacacaaagttaaacaaacaaacaaaaaacacaaaacataataaaacaccaagaacatgaggatggagagaagtatcagcacccagaagagaaaaaggaatttaaaacaaaaaccacagaggcggaaataccggagggctttgccttgcgaaaagggttggacatcatctcctgatttttcaatgttattcttcagtcctatttaaaaacaaaaccaagctcccttcccttcctcccccttcccttttttttcggtcagaccttttattttctactcttttcagaggggttttctgtttgtttgggttttgtttcttgctgtgactgaaacaagaaggttattgcagcaaaaatcagtaacaaaaaatagtaacaataccttgcagaggaaaggtgggagagaggaaaaaaggaaattctatagaaatctatatattgggttgtttttttttttgttttttgttttttttttttgggtttttttttttactatatatcttttttttgttgtctctagcctgatcagataggagcacaagcaggggacggaaagagagagacactcaggcggcagcattccctcccagccactgagctgtcgtgccagcaccattcctggtcacgcaaaacagaacccagttagcagcagggagacgagaacaccacacaagacatttttctacagtatttcaggtgcctaccacacaggaaaccttgaagaaaatcagtttctagaagccgctgttacctcttgtttacagtttatatatatatgatagatatgagatatatatataaaaggtactgttaactactgtacaacccgacttcataatggtgctttcaaacagcgagatgagtaaaaacatcagcttccacgttgccttctgcgcaaagggtttcaccaaggatggagaaagggagacagcttgcagatggcgcgttctcacggtgggctcttccccttggtttgtaacgaagtgaaggaggagaacttgggagccaggttctccctgccaaaaagggggctagatgaggtggtcgggcccgtggacagctgagagtgggattcatccagactcatgcaataaccctttgattgttttctaaaaggagactccctcggcaagatggcagagggtacggagtcttcaggcccagtttctcactttagccaattcgagggctccttgtggtgggatcagaactaatccagagtgtgggaaagtgacagtcaaaaccccacctggagcaaataaaaaaacatacaaaacgtactggtgctttcctgt

SEQ ID NO: 36 - protein, 760 aa, Homo sapiens
MPPRPAAAAASRPGPSSGDADLVLARRLPAHEPQGPTPRGLQWHLAPSGDRKSSRPGARAVAEKKAKVIAGMNAVEENQGPGESQKVEEASPPAVQQPTDPASPTVATTPEPVGSDAGDKNATKAGDDEPEYEDGRGFGIGELVWGKLRGFSWWPGRIVSWWMTGRSRAAEGTRWVMWFGDGKFSVVCVEKLMPLSSFCSAFHQATYNKQPMYRKAIYEVLQVASSRAGKLFPVCHDSDESDTAKAVEVQNKPMIEWALGGFQPSGPKGLEPPEEEKNPYKEVYTDMWVEPEAAAYAPPPPAKKPRKSTAEKPKVKEIIDERTRERLVYEVRQKCRNIEDICISCGSLNVTLEHPLFVGGMCQNCKNCFLECAYQYDDDGYQSYCTICCGGREVLMCGNNNCCRCFCVECVDLLVGPGAAQAAIKEDPWNCYMCGHKGTYGLLRRREDWPSRLQMFFANNHDQEFDPPKVYPPVPAEKRKPIRVLSLFDGIATGLLVLKDLGIQVDRYIASEVCEDSITVGMVRHQGKIMYVGDVRSVTQKHIQEWGPFDLVIGGSPCNDLSIVNPARKGLYEGTGRLFFEFYRLLHDARPKEGDDRPFFWLFENVVAMGVSDKRDISRFLESNPVMIDAKEVSAAHRARYFWGNLPGMNRPLASTVNDKLELQECLEHGRIAKFSKVRTITTRSNSIKQGKDQHFPVFMNEKEDILWCTEMERVFGFPVHYTDVSNMSRLARQRLLGRSWSVPVIRHLFAPLKEYFACV

SEQ ID NO: 37 - DNA, 4324 bp, Homo sapiens
cggcggcggcgagagcagaggacgagccgggacgcggcgccgcggcaccagggcgcgcagccgggccggcccgaccccaccggccatacggtggagccatcgaagcccccacccacaggctgacagaggcaccgttcaccagagggctcaacaccgggatctatgtttaagttttaactctcgcctccaaagaccacgataattccttccccaaagcccagcagccccccagccccgcgcagccccagcctgcctcccggcgcccagatgcccgccatgccctccagcggccccggggacaccagcagctctgctgcggagcgggaggaggaccgaaaggacggagaggagcaggaggagccgcgtggcaaggaggagcgccaagagcccagcaccacggcacggaaggtggggcggcctgggaggaagcgcaagcaccccccggtggaaagcggtgacacgccaaaggaccctgcggtgatctccaagtccccatccatggcccaggactcaggcgcctcagagctattacccaatggggacttggagaagcggagtgagccccagccagaggaggggagccctgctggggggcagaagggcggggccccagcagagggagagggtgcagctgagaccctgcctgaagcctcaagagcagtggaaaatggctgctgcacccccaaggagggccgaggagcccctgcagaagcgggcaaagaacagaaggagaccaacatcgaatccatgaaaatggagggctcccggggccggctgcggggtggcttgggctgggagtccagcctccgtcagcggcccatgccgaggctcaccttccaggcgggggacccctactacatcagcaagcgcaagcgggacgagtggctggcacgctggaaaagggaggctgagaagaaagccaaggtcattgcaggaatgaatgctgtggaagaaaaccaggggcccggggagtctcagaaggtggaggaggccagccctcctgctgtgcagcagcccactgaccccgcatcccccactgtggctaccacgcctgagcccgtggggtccgatgctggggacaagaatgccaccaaagcaggcgatgacgagccagagtacgaggacggccggggctttggcattggggagctggtgtgggggaaactgcggggcttctcctggtggccaggccgcattgtgtcttggtggatgacgggccggagccgagcagctgaaggcacccgctgggtcatgtggttcggagacggcaaattctcagtggtgtgtgttgagaagctgatgccgctgagctcgttttgcagtgcgttccaccaggccacgtacaacaagcagcccatgtaccgcaaagccatctacgaggtcctgcaggtggccagcagccgcgcggggaagctgttcccggtgtgccacgacagcgatgagagtgacactgccaaggccgtggaggtgcagaacaagcccatgattgaatgggccctggggggcttccagccttctggccctaagggcctggagccaccagaagaagagaagaatccctacaaagaagtgtacacggacatgtgggtggaacctgaggcagctgcctacgcaccacctccaccagccaaaaagccccggaagagcacagcggagaagcccaaggtcaaggagattattgatgagcgcacaagagagcggctggtgtacgaggtgcggcagaagtgccggaacattgaggacatctgcatctcctgtgggagcctcaatgttaccctggaacaccccctcttcgttggaggaatgtgccaaaactgcaagaactgctttctggagtgtgcgtaccagtacgacgacgacggctaccagtcctactgcaccatctgctgtgggggccgtgaggtgctcatgtgcggaaacaacaactgctgcaggtgcttttgcgtggagtgtgtggacctcttggtggggccgggggctgcccaggcagccattaaggaagacccctggaactgctacatgtgcgggcacaagggtacctacgggctgctgcggcggcgagaggactggccctcccggctccagatgttcttcgctaataaccacgaccaggaatttgaccctccaaaggtttacccacctgtcccagctgagaagaggaagcccatccgggtgctgtctctctttgatggaatcgctacagggctcctggtgctgaaggacttgggcattcaggtggaccgctacattgcctcggaggtgtgtgaggactccatcacggtgggcatggtgcggcaccaggggaagatcatgtacgtcggggacgtccgcagcgtcacacagaagcatatccaggagtggggcccattcgatctggtgattgggggcagtccctgcaatgacctctccatcgtcaaccctgctcgcaagggcctctacgagggcactggccggctcttctttgagttctaccgcctcctgcatgatgcgcggcccaaggagggagatgatcgccccttcttctggctctttgagaatgtggtggccatgggcgttagtgacaagagggacatctcgcgatttctcgagtccaaccctgtgatgattgatgccaaagaagtgtcagctgcacacagggcccgctacttctggggtaaccttcccggtatgaacaggccgttggcatccactgtgaatgataagctggagctgcaggagtgtctggagcatggcaggatagccaagttcagcaaagtgaggaccattactacgaggtcaaactccataaagcagggcaaagaccagcattttcctgtcttcatgaatgagaaagaggacatcttatggtgcactgaaatggaaagggtatttggtttcccagtccactatactgacgtctccaacatgagccgcttggcgaggcagagactgctgggccggtcatggagcgtgccagtcatccgccacctcttcgctccgctgaaggagtattttgcgtgtgtgtaagggacatgggggcaaactgaggtagcgacacaaagttaaacaaacaaacaaaaaacacaaaacataataaaacaccaagaacatgaggatggagagaagtatcagcacccagaagagaaaaaggaatttaaaacaaaaaccacagaggcggaaataccggagggctttgccttgcgaaaagggttggacatcatctcctgatttttcaatgttattcttcagtcctatttaaaaacaaaaccaagctcccttcccttcctcccccttcccttttttttcggtcagaccttttattttctactcttttcagaggggttttctgtttgtttgggttttgtttcttgctgtgactgaaacaagaaggttattgcagcaaaaatcagtaacaaaaaatagtaacaataccttgcagaggaaaggtgggagagaggaaaaaaggaaattctatagaaatctatatattgggttgtttttttttttgttttttgttttttttttttgggtttttttttttactatatatcttttttttgttgtctctagcctgatcagataggagcacaagcaggggacggaaagagagagacactcaggcggcagcattccctcccagccactgagctgtcgtgccagcaccattcctggtcacgcaaaacagaacccagttagcagcagggagacgagaacaccacacaagacatttttctacagtatttcaggtgcctaccacacaggaaaccttgaagaaaatcagtttctagaagccgctgttacctcttgtttacagtttatatatatatgatagatatgagatatatatataaaaggtactgttaactactgtacaacccgacttcataatggtgctttcaaacagcgagatgagtaaaaacatcagcttccacgttgccttctgcgcaaagggtttcaccaaggatggagaaagggagacagcttgcagatggcgcgttctcacggtgggctcttccccttggtttgtaacgaagtgaaggaggagaacttgggagccaggttctccctgccaaaaagggggctagatgaggtggtcgggcccgtggacagctgagagtgggattcatccagactcatgcaataaccctttgattgttttctaaaaggagactccctcggcaagatggcagagggtacggagtcttcaggcccagtttctcactttagccaattcgagggctccttgtggtgggatcagaactaatccagagtgtgggaaagtgacagtcaaaaccccacctggagcaaataaaaaaacatacaaaacgtactggtgctttcctgt

SEQ ID NO: 38 - protein, 912 aa, Homo sapiens
MPAMPSSGPGDTSSSAAEREEDRKDGEEQEEPRGKEERQEPSTTARKVGRPGRKRKHPPVESGDTPKDPAVISKSPSMAQDSGASELLPNGDLEKRSEPQPEEGSPAGGQKGGAPAEGEGAAETLPEASRAVENGCCTPKEGRGAPAEAGKEQKETNIESMKMEGSRGRLRGGLGWESSLRQRPMPRLTFQAGDPYYISKRKRDEWLARWKREAEKKAKVIAGMNAVEENQGPGESQKVEEASPPAVQQPTDPASPTVATTPEPVGSDAGDKNATKAGDDEPEYEDGRGFGIGELVWGKLRGFSWWPGRIVSWWMTGRSRAAEGTRWVMWFGDGKFSVVCVEKLMPLSSFCSAFHQATYNKQPMYRKAIYEVLQVASSRAGKLFPVCHDSDESDTAKAVEVQNKPMIEWALGGFQPSGPKGLEPPEEEKNPYKEVYTDMWVEPEAAAYAPPPPAKKPRKSTAEKPKVKEIIDERTRERLVYEVRQKCRNIEDICISCGSLNVTLEHPLFVGGMCQNCKNCFLECAYQYDDDGYQSYCTICCGGREVLMCGNNNCCRCFCVECVDLLVGPGAAQAAIKEDPWNCYMCGHKGTYGLLRRREDWPSRLQMFFANNHDQEFDPPKVYPPVPAEKRKPIRVLSLFDGIATGLLVLKDLGIQVDRYIASEVCEDSITVGMVRHQGKIMYVGDVRSVTQKHIQEWGPFDLVIGGSPCNDLSIVNPARKGLYEGTGRLFFEFYRLLHDARPKEGDDRPFFWLFENVVAMGVSDKRDISRFLESNPVMIDAKEVSAAHRARYFWGNLPGMNRPLASTVNDKLELQECLEHGRIAKFSKVRTITTRSNSIKQGKDQHFPVFMNEKEDILWCTEMERVFGFPVHYTDVSNMSRLARQRLLGRSWSVPVIRHLFAPLKEYFACV

SEQ ID NO: 39 - DNA, 3608 bp, Homo sapiens
ccctccgcccccagccccatcgcccccttcccctcccccaagacgggcagctacttccagagcttcagggccgcggctcacacctgagcgcgactgcagaggggctgcacctggccttatggggatcctggagcgggttgtgagaaggaatgggcgcgtggatcgtagcctgaaagacgagtgtgatacggctgagaagaaagccaaggtcattgcaggaatgaatgctgtggaagaaaaccaggggcccggggagtctcagaaggtggaggaggccagccctcctgctgtgcagcagcccactgaccccgcatcccccactgtggctaccacgcctgagcccgtggggtccgatgctggggacaagaatgccaccaaagcaggcgatgacgagccagagtacgaggacggccggggctttggcattggggagctggtgtgggggaaactgcggggcttctcctggtggccaggccgcattgtgtcttggtggatgacgggccggagccgagcagctgaaggcacccgctgggtcatgtggttcggagacggcaaattctcagtggtgtgtgttgagaagctgatgccgctgagctcgttttgcagtgcgttccaccaggccacgtacaacaagcagcccatgtaccgcaaagccatctacgaggtcctgcaggtggccagcagccgcgcggggaagctgttcccggtgtgccacgacagcgatgagagtgacactgccaaggccgtggaggtgcagaacaagcccatgattgaatgggccctggggggcttccagccttctggccctaagggcctggagccaccagaagaagagaagaatccctacaaagaagtgtacacggacatgtgggtggaacctgaggcagctgcctacgcaccacctccaccagccaaaaagccccggaagagcacagcggagaagcccaaggtcaaggagattattgatgagcgcacaagagagcggctggtgtacgaggtgcggcagaagtgccggaacattgaggacatctgcatctcctgtgggagcctcaatgttaccctggaacaccccctcttcgttggaggaatgtgccaaaactgcaagaactgctttctggagtgtgcgtaccagtacgacgacgacggctaccagtcctactgcaccatctgctgtgggggccgtgaggtgctcatgtgcggaaacaacaactgctgcaggtgcttttgcgtggagtgtgtggacctcttggtggggccgggggctgcccaggcagccattaaggaagacccctggaactgctacatgtgcgggcacaagggtacctacgggctgctgcggcggcgagaggactggccctcccggctccagatgttcttcgctaataaccacgaccaggaatttgaccctccaaaggtttacccacctgtcccagctgagaagaggaagcccatccgggtgctgtctctctttgatggaatcgctacagggctcctggtgctgaaggacttgggcattcaggtggaccgctacattgcctcggaggtgtgtgaggactccatcacggtgggcatggtgcggcaccaggggaagatcatgtacgtcggggacgtccgcagcgtcacacagaagcatatccaggagtggggcccattcgatctggtgattgggggcagtccctgcaatgacctctccatcgtcaaccctgctcgcaagggcctctacgagggcactggccggctcttctttgagttctaccgcctcctgcatgatgcgcggcccaaggagggagatgatcgccccttcttctggctctttgagaatgtggtggccatgggcgttagtgacaagagggacatctcgcgatttctcgagtccaaccctgtgatgattgatgccaaagaagtgtcagctgcacacagggcccgctacttctggggtaaccttcccggtatgaacaggccgttggcatccactgtgaatgataagctggagctgcaggagtgtctggagcatggcaggatagccaagttcagcaaagtgaggaccattactacgaggtcaaactccataaagcagggcaaagaccagcattttcctgtcttcatgaatgagaaagaggacatcttatggtgcactgaaatggaaagggtatttggtttcccagtccactatactgacgtctccaacatgagccgcttggcgaggcagagactgctgggccggtcatggagcgtgccagtcatccgccacctcttcgctccgctgaaggagtattttgcgtgtgtgtaagggacatgggggcaaactgaggtagcgacacaaagttaaacaaacaaacaaaaaacacaaaacataataaaacaccaagaacatgaggatggagagaagtatcagcacccagaagagaaaaaggaatttaaaacaaaaaccacagaggcggaaataccggagggctttgccttgcgaaaagggttggacatcatctcctgatttttcaatgttattcttcagtcctatttaaaaacaaaaccaagctcccttcccttcctcccccttcccttttttttcggtcagaccttttattttctactcttttcagaggggttttctgtttgtttgggttttgtttcttgctgtgactgaaacaagaaggttattgcagcaaaaatcagtaacaaaaaatagtaacaataccttgcagaggaaaggtgggagagaggaaaaaaggaaattctatagaaatctatatattgggttgtttttttttttgttttttgttttttttttttgggtttttttttttactatatatcttttttttgttgtctctagcctgatcagataggagcacaagcaggggacggaaagagagagacactcaggcggcagcattccctcccagccactgagctgtcgtgccagcaccattcctggtcacgcaaaacagaacccagttagcagcagggagacgagaacaccacacaagacatttttctacagtatttcaggtgcctaccacacaggaaaccttgaagaaaatcagtttctagaagccgctgttacctcttgtttacagtttatatatatatgatagatatgagatatatatataaaaggtactgttaactactgtacaacccgacttcataatggtgctttcaaacagcgagatgagtaaaaacatcagcttccacgttgccttctgcgcaaagggtttcaccaaggatggagaaagggagacagcttgcagatggcgcgttctcacggtgggctcttccccttggtttgtaacgaagtgaaggaggagaacttgggagccaggttctccctgccaaaaagggggctagatgaggtggtcgggcccgtggacagctgagagtgggattcatccagactcatgcaataaccctttgattgttttctaaaaggagactccctcggcaagatggcagagggtacggagtcttcaggcccagtttctcactttagccaattcgagggctccttgtggtgggatcagaactaatccagagtgtgggaaagtgacagtcaaaaccccacctggagcaaataaaaaaacatacaaaacgtactggtgctttcctgt

SEQ ID NO: 40 - protein, 723 aa, Homo sapiens
MGILERVVRRNGRVDRSLKDECDTAEKKAKVIAGMNAVEENQGPGESQKVEEASPPAVQQPTDPASPTVATTPEPVGSDAGDKNATKAGDDEPEYEDGRGFGIGELVWGKLRGFSWWPGRIVSWWMTGRSRAAEGTRWVMWFGDGKFSVVCVEKLMPLSSFCSAFHQATYNKQPMYRKAIYEVLQVASSRAGKLFPVCHDSDESDTAKAVEVQNKPMIEWALGGFQPSGPKGLEPPEEEKNPYKEVYTDMWVEPEAAAYAPPPPAKKPRKSTAEKPKVKEIIDERTRERLVYEVRQKCRNIEDICISCGSLNVTLEHPLFVGGMCQNCKNCFLECAYQYDDDGYQSYCTICCGGREVLMCGNNNCCRCFCVECVDLLVGPGAAQAAIKEDPWNCYMCGHKGTYGLLRRREDWPSRLQMFFANNHDQEFDPPKVYPPVPAEKRKPIRVLSLFDGIATGLLVLKDLGIQVDRYIASEVCEDSITVGMVRHQGKIMYVGDVRSVTQKHIQEWGPFDLVIGGSPCNDLSIVNPARKGLYEGTGRLFFEFYRLLHDARPKEGDDRPFFWLFENVVAMGVSDKRDISRFLESNPVMIDAKEVSAAHRARYFWGNLPGMNRPLASTVNDKLELQECLEHGRIAKFSKVRTITTRSNSIKQGKDQHFPVFMNEKEDILWCTEMERVFGFPVHYTDVSNMSRLARQRLLGRSWSVPVIRHLFAPLKEYFACV

SEQ ID NO: 41 - DNA, 4395 bp, Homo sapiens
gcagtgggctctggcggaggtcgggagaactgcagggcgaaggccgccgggggctccgcgggctgcggggggaggcacttgacaccggcccggggagaggaggggccgctgtccctgcggccagtgctggatgcggggacccagcgcagaagcagcgccaggtggagccatcgaagcccccacccacaggctgacagaggcaccgttcaccagagggctcaacaccgggatctatgtttaagttttaactctcgcctccaaagaccacgataattccttccccaaagcccagcagccccccagccccgcgcagccccagcctgcctcccggcgcccagatgcccgccatgccctccagcggccccggggacaccagcagctctgctgcggagcgggaggaggaccgaaaggacggagaggagcaggaggagccgcgtggcaaggaggagcgccaagagcccagcaccacggcacggaaggtggggcggcctgggaggaagcgcaagcaccccccggtggaaagcggtgacacgccaaaggaccctgcggtgatctccaagtccccatccatggcccaggactcaggcgcctcagagctattacccaatggggacttggagaagcggagtgagccccagccagaggaggggagccctgctggggggcagaagggcggggccccagcagagggagagggtgcagctgagaccctgcctgaagcctcaagagcagtggaaaatggctgctgcacccccaaggagggccgaggagcccctgcagaagcgggcaaagaacagaaggagaccaacatcgaatccatgaaaatggagggctcccggggccggctgcggggtggcttgggctgggagtccagcctccgtcagcggcccatgccgaggctcaccttccaggcgggggacccctactacatcagcaagcgcaagcgggacgagtggctggcacgctggaaaagggaggctgagaagaaagccaaggtcattgcaggaatgaatgctgtggaagaaaaccaggggcccggggagtctcagaaggtggaggaggccagccctcctgctgtgcagcagcccactgaccccgcatcccccactgtggctaccacgcctgagcccgtggggtccgatgctggggacaagaatgccaccaaagcaggcgatgacgagccagagtacgaggacggccggggctttggcattggggagctggtgtgggggaaactgcggggcttctcctggtggccaggccgcattgtgtcttggtggatgacgggccggagccgagcagctgaaggcacccgctgggtcatgtggttcggagacggcaaattctcagtggtgtgtgttgagaagctgatgccgctgagctcgttttgcagtgcgttccaccaggccacgtacaacaagcagcccatgtaccgcaaagccatctacgaggtcctgcaggtggccagcagccgcgcggggaagctgttcccggtgtgccacgacagcgatgagagtgacactgccaaggccgtggaggtgcagaacaagcccatgattgaatgggccctggggggcttccagccttctggccctaagggcctggagccaccagaagaagagaagaatccctacaaagaagtgtacacggacatgtgggtggaacctgaggcagctgcctacgcaccacctccaccagccaaaaagccccggaagagcacagcggagaagcccaaggtcaaggagattattgatgagcgcacaagagagcggctggtgtacgaggtgcggcagaagtgccggaacattgaggacatctgcatctcctgtgggagcctcaatgttaccctggaacaccccctcttcgttggaggaatgtgccaaaactgcaagaactgctttctggagtgtgcgtaccagtacgacgacgacggctaccagtcctactgcaccatctgctgtgggggccgtgaggtgctcatgtgcggaaacaacaactgctgcaggtgcttttgcgtggagtgtgtggacctcttggtggggccgggggctgcccaggcagccattaaggaagacccctggaactgctacatgtgcgggcacaagggtacctacgggctgctgcggcggcgagaggactggccctcccggctccagatgttcttcgctaataaccacgaccaggaatttgaccctccaaaggtttacccacctgtcccagctgagaagaggaagcccatccgggtgctgtctctctttgatggaatcgctacagggctcctggtgctgaaggacttgggcattcaggtggaccgctacattgcctcggaggtgtgtgaggactccatcacggtgggcatggtgcggcaccaggggaagatcatgtacgtcggggacgtccgcagcgtcacacagaagcatatccaggagtggggcccattcgatctggtgattgggggcagtccctgcaatgacctctccatcgtcaaccctgctcgcaagggcctctacgagggcactggccggctcttctttgagttctaccgcctcctgcatgatgcgcggcccaaggagggagatgatcgccccttcttctggctctttgagaatgtggtggccatgggcgttagtgacaagagggacatctcgcgatttctcgagtccaaccctgtgatgattgatgccaaagaagtgtcagctgcacacagggcccgctacttctggggtaaccttcccggtatgaacaggccgttggcatccactgtgaatgataagctggagctgcaggagtgtctggagcatggcaggatagccaagttcagcaaagtgaggaccattactacgaggtcaaactccataaagcagggcaaagaccagcattttcctgtcttcatgaatgagaaagaggacatcttatggtgcactgaaatggaaagggtatttggtttcccagtccactatactgacgtctccaacatgagccgcttggcgaggcagagactgctgggccggtcatggagcgtgccagtcatccgccacctcttcgctccgctgaaggagtattttgcgtgtgtgtaagggacatgggggcaaactgaggtagcgacacaaagttaaacaaacaaacaaaaaacacaaaacataataaaacaccaagaacatgaggatggagagaagtatcagcacccagaagagaaaaaggaatttaaaacaaaaaccacagaggcggaaataccggagggctttgccttgcgaaaagggttggacatcatctcctgatttttcaatgttattcttcagtcctatttaaaaacaaaaccaagctcccttcccttcctcccccttcccttttttttcggtcagaccttttattttctactcttttcagaggggttttctgtttgtttgggttttgtttcttgctgtgactgaaacaagaaggttattgcagcaaaaatcagtaacaaaaaatagtaacaataccttgcagaggaaaggtgggagagaggaaaaaaggaaattctatagaaatctatatattgggttgtttttttttttgttttttgttttttttttttgggtttttttttttactatatatcttttttttgttgtctctagcctgatcagataggagcacaagcaggggacggaaagagagagacactcaggcggcagcattccctcccagccactgagctgtcgtgccagcaccattcctggtcacgcaaaacagaacccagttagcagcagggagacgagaacaccacacaagacatttttctacagtatttcaggtgcctaccacacaggaaaccttgaagaaaatcagtttctagaagccgctgttacctcttgtttacagtttatatatatatgatagatatgagatatatatataaaaggtactgttaactactgtacaacccgacttcataatggtgctttcaaacagcgagatgagtaaaaacatcagcttccacgttgccttctgcgcaaagggtttcaccaaggatggagaaagggagacagcttgcagatggcgcgttctcacggtgggctcttccccttggtttgtaacgaagtgaaggaggagaacttgggagccaggttctccctgccaaaaagggggctagatgaggtggtcgggcccgtggacagctgagagtgggattcatccagactcatgcaataaccctttgattgttttctaaaaggagactccctcggcaagatggcagagggtacggagtcttcaggcccagtttctcactttagccaattcgagggctccttgtggtgggatcagaactaatccagagtgtgggaaagtgacagtcaaaaccccacctggagcaaataaaaaaacatacaaaacgtactggtgctttcctgt

SEQ ID NO: 42 - protein, 912 aa, Homo sapiens; identical to SEQ ID NO: 38

SEQ ID NO: 43 - DNA, 1808 bp, Homo sapiens
gcagtgggctctggcggaggtcgggagaactgcagggcgaaggccgccgggggctccgcgggctgcggggggaggcacttgacaccggcccggggagaggaggggccgctgtccctgcggccagtgctggatgcggggacccagcgcagaagcagcgccaggtggagccatcgaagcccccacccacaggctgacagaggcaccgttcaccagagggctcaacaccgggatctatgtttaagttttaactctcgcctccaaagaccacgataattccttccccaaagcccagcagccccccagccccgcgcagccccagcctgcctcccggcgcccagatgcccgccatgccctccagcggccccggggacaccagcagctctgctgcggagcgggaggaggaccgaaaggacggagaggagcaggaggagccgcgtggcaaggaggagcgccaagagcccagcaccacggcacggaaggtggggcggcctgggaggaagcgcaagcaccccccggtggaaagcggtgacacgccaaaggaccctgcggtgatctccaagtccccatccatggcccaggactcaggcgcctcagagctattacccaatggggacttggagaagcggagtgagccccagccagaggaggggagccctgctggggggcagaagggcggggccccagcagagggagagggtgcagctgagaccctgcctgaagcctcaagagcagtggaaaatggctgctgcacccccaaggagggccgaggagcccctgcagaagcgggtgagtcctcagcaccaggggcagcctcttctgggcccaccagcataccctgagagtcagggacttggctctccagcaggtcccaggaaggatggtctgggtcgtggctaaaggtctgcttgccaaggctatggcctggaggctactggctggatgcagcctgcgcatatgttttatttggcccatagagtgttttaaacatttaaaaaattagttgccagtatttaaaaatcaaaaaatttcacataaaaatctggagttttggcttctcatgaaaaaaaaaaaagctagatctggcaacagcgggctttcataacgccaacgattgctagactgggataatggcggtccctccatcgccttctgtggctggttgtgggccttagttttctgcagctctacctggcctgcttactctcccacgtgccatgcagttcctgggggttgctgtatttgtagcccctggcctgggcactcaagggcagcagataccctgtttgcctccctgagtgcagaggtcctgagcccaccctagttgggctgactcaactggaaatttggttgtgacagtggcgtggggagagggctgggtgattgtattctgtgtactgcccagcccaggcctcttcatctggggactttttggcctaaccctggaagcctggaaagttgcccacttttctctttcaggttaagccagcaatttcagggccaaccgagctgtaaacatgttagtaatgaggacaactagcatttgtacagggcttcacagtttacaaagcgctttctcatacattatcacatttgatcctcccagggccctgccaggttgttttgcatatgtgcattttaatttcaaaaagtcttccttccaagcgtgtatgatgaaatgagtaaattgattaattggcgtaacttattttgcatggatccaacctaatgttcatgcaggatagagaacatttccagaatacaaatttccaaacttaaaaaaaaaaaaaaaaaaaaaaaaaaaaaaaaaa

SEQ ID NO: 44 - protein, 166 aa, Homo sapiens; identical to SEQ ID NO: 34

SEQ ID NO: 45 - DNA, 149939 bp, Homo sapiens
atgattgaagatagacttccacactttgtgggtgaatcatacattttttttaaatatacattttccctgttgtaatttgacagagtatttttctctctcatcagcttactatgatgtctcccttactcctggttatttcagttgtgagtacgctgacactactagatctaacttaagtcaaaaggagaaatttgtcataaggaagtattttcaagatagaaaatgcatgaagttttggtggaccttataagaaagagggaactgaaaagctatggggacacatactgcgcacattctctctctcttctcttctgtggcattcttctctcctatagcaaatcagctttctgtgcaagaatgaagatggtaacctcatagtggcagccttaactttagagcatgggtaacctcatttcaagtgaacagaaaagtctgatttgctgtttttgaatcccaactccaaattccccaggagtgagactctgatggctcagcttggtccaatcaaggggttgtgggaagcagggtgtcacaaactagaacgtaggtgccagaggctggctactctgggtgaagaggacagttctcagcaaagaggacagaatccttagtctaaattaggactcaggaattaagtctctgagtctctgtaaactaacaattatgctagggatttatttttattttttattttattttattttattttttgagatgggagtcttgctctgttgcccaggctggagtgcagtagcatgatctcggctcactgcaacctccacctcccaggttcaagtgaatctcctgccgcagcctcctgagtagctgggactataggcacatgccaccatgcctggctaattttttgtatttttagtagagacagggtttcaccatgttagccaggagatcttgatctcctgaccttgtgatccacccacgctggactcccaaagtgctgggattacaggtgtgagccactgcgcctggccgaaattttgtttttaagagtgaatgctggcatgaatcctttcacacacacaaaaaatgtttttcgtgaataggcaactatatgtctaacagttttaagttaaattttttaaaagtagcacatagttataatggtcattttacatattttgccaaataattatcctcacttgaaagaggttattaattcttggcttacaaagggaaaactgttttggttttcaagcaccaaagtttaatacatccagttatctcaagggaatgagggatctgttcactggcaatatcttttttgttttccttttctttttgtgattgaaagtaaggataagggaactgatgtagagacaaggacatgctgaagtaccgaggaggtattggaaaatttctttgccatagccaaccaaattttggaataaatggtactaaaatatctggatgatttgtagtaaaaaaaacattgcttgcttgtctgtctacttgattaataccccttgcctttgtcttttggcttataatcctacatttggaataaataagcctctttccatattttattcctttctgccttcaggaaagtacatcttccctgttttggaaagaaacaaactaactcctggacttctccccagcccttcgtttgagcctgtttccctttccaaggactttcctgcatctttttttgtgctcacatttatgtccctccttaagaatgatgttttcagtctcatcatttaatgatatagttctgttttttaaaattcaaatggagatcttcacatttatctctattacaactcagcccttatcctaccagcccacacagtcctgtgtagtgcaataaactgtgacaaatacttcaatcttcctaataaaattcaacaaatttcttatacctcccagcttggttatatctgtaaattggtcctgccacagatataatagacatttgataactgtgctaagggttttaaaatactttttcacctaatcttcaaaatctctctacaggggagattattatcctcattatactgatgaggaaacagaggcttagaaaatctaaataaactttcctggcaaaagctgtgattgaaagaaacctgggtggtctggactcttaaagcgtaagttcttaaacccttggccatggattttcaaccgtggctttatgtcaaaccacctaaaaatgttaaaaagttatagaagccaatgcgccatctcacacttactgaggcagtcttgttggggtggggggaaggtttgggcatagcagtcaagaatcactgctgccatgctggccaacactggaaggacaaaacctcaagacactacacacagccccacagtcaacaactagctgttaagttttcccattagatcttgccacaaagttttgaatctaaatgtgttaccttacagctcatatttcttgtttcttcatattgtatgaatgttttgaaagacttggtcaaattccttggaattcttttcatcattatcaaagaataagggaaatttcctgaaatgtttgccttgagtagcaaatttctagtgatgccactaccaggaatcacataaagagctcaaaagttctgttaatacagagtgaaaaaagctcaacattccaggttagcattgacttaaaatcatgtcttagtgatgagggaggctttcactttctgaatgacaggaggcaagttgcttcatctttctatgtggggagacagaagatttctcaattctataggcttatgaataatataccccttgtccaccttgtcttccatacccacatctctaatattaagaaaataacctgctcccccacaaaaatatcctcaatattcaccacttccaaatggcttctccctgcaattcaccaatttcaaatggcttctccctgcaaacaggctgtggacagtaagagataccatgcctagttacataagtatatcactgcaaaatatagaaacatcacttataatgaaagtaatactgtttcagagttctaaaacaagcattttcttcccctcacaaaatatcacatttccatttccacagttgtgatgcttttcatttacccatgacgttaagctcatctttagctcttcttcattatgtgggtctgtgttctagcttttacctcagtagcagtttttgtttgcaggaaaaaaggaactcttttggtagtcactgtttgtaattgcggccttgatattctaagccattgagtcacaattaataattagaaattcttactaactttgcccatatattacctatgaagcagtagccgtaggaatgcaattttcctgtaaatccctccctcttatacagctctagttcattatttaaaagattcagggtgaattcaagtaatttcctatgctgctatcatttgcttaaagaccttttgcaatgggtcttatgtaagaagaaatgcaggagttgctttggtgaggtttatttaaagaaaccattaagtgcaagacagacctgaagagcagcatcagttgtgtatggggaaacaggagctatgaatgcgtcacttcatttaggttgacagaaagagggctaatacttgaaaaaaatccctacacgatctggtgccaggctacttctttggcctcacctcttaccactgccccctccttccgtgtcctccagccacagtgacctctttcctgatccttgaacttgccaaacactttcccttctcaaggtctttgccttcaggagtccctctgcctgaaattcttttcccagatagtcatgggactggttcattctcatccttcagatctctgctcaaatgtcacttattctaggaaatcgttcctggccaccgtaaaatagcacaccccctcctcactttctactccttttctttgttattatgtatatggcagcagaaaactatgcattttcttagtggcaattacacaccccgcacattatgcatttaaagcgttgtttgttgttttgtcgcttccatcagaatacaatccagtagggcaaggagtgtgtggggtcgtgttcacctggtatctctggggacctacagcccggcacctagtagacactcagtaaatatttgaatgaatgaatgaggccctttggcagccgggaagcccgtcacagccgttgtctccaccctctcccgggctacaccaggccacgccggtaaagttgtttctcctctaggagaaacattcgctaggccttgttgccaacccgcaggcggctgggcgcttcatcccaccctcacccctttccagccaaggtggctgatgggagtcaggctctcgagggcgcattgccacgaaacagcgtgtgtgagcgcgttgtccccggcccccggcgccacttcccctcggcctagcagcctggactggggaaggacgggtctgctgtacccgggaggtggaaggaaaagccgaaagcggagaagtgtgcgggaggggagtctccgcgcggaggcagcccggcctcctccagtgcaggctgcgcgctggggagccagccagggtgagtcactcccggccgcttccctggagggcggcggccacacacacacccgcccatctagtgagggccgggcccagcgctggcgcctagctccagccgggcaccagcgtttcgcgaggcgccgccgccttaacttccttgcgcgctcacgcccaggggccgtcccaggaatctccacgcgcgctcgccggcttcccgagaggcagctgccctgcgtggcccgcgcctgccggtcccgcgaccagcaccgagcggcgcacgcgcactgcaggacgcgcgtccggctctcccccagcctctatccggcccggtctcctgccattcggggagactgcaggccaaccgggaggctgagttcgaagctagcagggcggcgaagccagtgtcgcccgcggcgttgagaagacggtgtggccccggagagggtggagacaactgtgacgggcttcccggctgcccgaagtgggagtggtgtggggctgcaggaaggagagaggaagaggagcagaagggggcagcagcggacgccgctaacggcctccctcggcgctgacaggctgggccggcgcccggctcgcttgggtgttcgcgtcgccacttcggcttctcggccggtcgggcccctcggcccgggcttgcggcgcgcgtcggggctgagggctgctgcggcgcagggagaggcctggtcctcgctgccgagggatgtgagtgggagctgagcccacactggagggcccccgagggcccagcctggaggtcgttcagagccgtgcccgtcccggggcttcgcagaccttgacccgccgggtaggagccgcccctgcgggctcgagggcgcgctctggtcgcccgatctgtgtagccggtgggtgttatctctgcctggcttctgggtggggggcagcagctgtctctccacccccttcctaccttttggtcccgcctgccccctgctagtggcagcaaacttctgagccagaaaaatcttcctctttaagacgacacctagaacgagtcttgctggtgatatttgcttccatttgtgtcttataattccctcgctcccgcctccttattcctttttaaaattttctagacacttaaacagcctagaaaaagcatttgtttcccctggatttatgtggtagtagttaactgctgcttctgtttttaggtttcagaagcaggcaacaggaacaagatgtgaactgtttctcttctgcagaaaaagaggctcttcctcctcctcccgcgacggtgggtgtgctgtcctttatcgctgcagtaaaggcgaaggtgtctggagctgggagtgcgtgcgtagggaaggttggaagcgtgtgaagagaggcagggctcattgttgcttactcttctgaaaatgtcagtgctaaacttttaatgttgatctgggagagtaattttggggtgttttgttgttcgtcttggatcctttaagaaacatttttttgttggctttacacataacgtgactttgcagagaaacgaaaaacgttgtccattaccctttcttcttaagcagccagagattcttaatcctttaaagaggagtatttccaagcaataagagatagcttttgggagaacacgttagctattcttgctggggtttctgctaccacattgaatgtttcctcatggttttatctgcctaagcttgctgtgtcggttgaatttacccagtttgttttccagtaattactaatctgttaggagaaactccatttctctgaatgaaagggtaggagcggctgagtatggagaaggaaactggaagtgggaataagggaaatgattgcttttggtttcataataagtttgtacagtgagttgttgggctactgcaaataaagattttgtatcccttctccagaatgcttgggaccaaaagtgttttggattttttttaaaaattttggaatgtttgcatatacaaaatcagacatcttgaggatgggacccaagtgtaaatacgaaattcgtttgtttcatatagaccttattcacacagccactaagtcatttgcaatatttttaatacgtctgtgcatgaaacaaagtttgtattaagtacctatgcggggaattttccccttgtagcatcatgttggtgctcaaaatgtttcagattttgcagcttttcagataagggatgatcagcttgtattttgatataacacccagaacatttgaagatgaataatcaatttttggcctcccttcccccatccgcctcaccttataccactttaagtgtgagaattatttgcttgtacatgcatttgtctgttggtgtgtaacgtatgtacagactggatgtatccagcacttgccttaatagtacatgtatttacctgaataggaaagctgcagtacttgctggccagaagagcacaccatgcttgtttttgctctaactgaatatcctgtatttgcaatttatagcagttttagggactcattagggaattttgtgtgtgtgtgcctttggtgatttgagacaggtgtctcagatatgggaagggaatatgacattgtttctctttcacctggctattactgaaaggtgggatgcttttgaggcagaataggaaagtgcattggctttggagtgagatctggatttgaatcctggtgttcttgccacttaagagttgcattatttacggctggtcatggtggctcacgcctgtaatcccagcactttgggaggctgaggaaggaggatcacttgaggtgaggagcttgagaccagcctggccaacatggtgaaaccccatctctactaaaaatacaaaaattagccgggcgtggtggtgcacacctgtaatcccagctactcgggagggtgaggcaggagaattgcttgaacctgggaagtggtggttgcagtgagccgagatctcaccactgcactccaggctgggcaacacagcaagactctgtctaaaaaaaaaaaaaaaaagaaagaaaaaaagagttatattatttacgactcttttagcttcactttcttataagattgttgtgagaagtgagtaagacacatgcaaagtggtaaactgcctggctgtcataaaagtcttggctactatcacggctgggaggcaaaggagattcagagaagggcagaatgactgcataaggtgatctgcctgtaactcgtgtttcctcctttctagtataaagagataaaggacttcaaggtcttaaactggtgagggagtattacagcctttgtatggaaaggtttgactttgtgtctctgcttaaacccccattgtgttgcccctaccaattattgtgctgcccccttgtggttaactgtgctaagacctttcttttgctcttctcccattacatttcccacccttccccactcccttttagacccctcctcttagctcccagtttcccaaactgtgtgccaaggtgcccagagcacctcaggcttgaacttgtgttttgagttggttcatggtttcaatattagatacctacacccgtttctacaatgtcatgtctttgtaaagatgtattttcagaggttgctccgataaaaagcaactactacatgaaaatgaatgtagaacaggaaatgacagtgtggtattgtccaatttgattctaaggtttgataagttctacagtgctctacactaagttgtaaggacataactactaagtaagttgttcaaacctatttcttttggcctgggggtgtcgtgaaaaatttgctaagactcagagctccctgaatgggtttggaaacctctgccttagcttttagtttgcttttctgataaaattattgatataaagctagtaccagctgatcatggcttaatatatttcctctcctatgtaatatgtttataacttctgcccagttctttcattttaaaactaatcctattgctaacttgttgtactagtcacttcctggtttttcctgtactggtcttctgcttctacttctgttcatctccttaaactccgaatgccccaagtgaaagttaccattttctaccccttaattttcttctaatcatgtaggctttaaattaggcatcatctttaaactacttctttcatttacctcttattcccattcaaaatgtccatatttcctttctttctcatatctctgctttccctcctttactgtgtgaatcccaggacacatttcctgagcctagaatattgaaagtcatttgaacttctgagaattcagtgtcccttccttctgtttatcctcaatagagattccactctaatactccttattatagcattcccttgccccaaaaccttcagtggcttaccattttctacttattaaattttcctgacttttaagatagtctattatcaatccctgccctatttatttagtcttttgtctaaggatctctagtccttaagcttgtaagctgatttccacactttctaataataagctatgcttcttctatcctttaatttttgcccatgttctccatccctcttttttttcctctatttctgtagctctttagtcttagaacattttcacatggtttaattatatgccatgctttagttgtttgatagttatttccctagtgttagccatatcttttcaagttgattgtgtattctttgaggagcagtaccttagattaaaaaaaaaccacaacacacagtggagagcacatgggcagcattcaagaaatacatgttgattgtgtgataaggaactgtagtcaccaaacaaatatttgttaatacttgcaatgtaaaaggtacttggctgtattcaaaagagaaataaagaaatataaaataggctcctttccctaaggacttacagtataattgggcagataagctaaataataaaagttacagatatttaagaccacttgagttgagcagagattttgcataataggaaggaactggtagagggggtaagcaaaggcaaaatatgtatatatgtatgatatgttcagagagcagtacataaataacttgactgaaatgaagatttgtgtgaaagagtagtaagaaattgtgttaaaaatgtagttggaatttgattatggatgtctttaaatgctaggatgagaagaatgtactttgacctgtagatatggagaagctttaaaagttttgaattgagaaagagtttgctgaaataagtattttaggaaaatcaaagcagcaccagtgctaggtctcatatgaattggaaagagaatggtagaaagaggtaggaaaataattgagccctgaagtaatgaggacttagaaataagtcagattgcagagatgtcacaagacattattatggattggataagaagggagaatggaggggagaagagtgattaaagattaccttaccttgaaggtttgcttttcagtgacggaggaaatcaaagagtgttgactctccaagacatcttagaacatctaagtctatatgttttgtatattaggactcagaccagagagatttaaaaatgtgtccaaagttactcagctagttaatgacaaagaaactgccgtttgattaatggcagttactaacaaaaatagttatggcagtgttagtagctggtagaggggatgtagacagttgagcgtatattgtggatatgttgagtttgcggtggccgtgggatgggcaagtgaaaattgatagcatacagtgggacatatgactagaatttgttagcgaagttaaggctggtgctgtggtacttaagagaaaagagtgggattgcccataattagcgggtgggtgaaaggagaggaatgggtaaaggagacaaagaaaaaaacagtatgagaggcaaattagtggataggttaggaggcggaatgatcaacatgttgatcattggcaagaaatgagaagaatcagatccaaaaaaaggtcttaaaaagatgtattcgtgtttttcctaataagaaatctataaaaacagaagaaaattgcttatactttccctacgtggaaataaccactgttaatattttgttctctccggtttaacaaaagacctttggatttgacagttgggtgatcagtggagacttttccaaagctctccatcactaggactaaggatgagaattttaggcataataaaacctaggagatatttttcaacagattgtcattcgtctgtatcgtcttatatatcacactgtccaggtactattcttcctgtgtgcattggttctgtgtttttttctgaatgatagaaggttagacaagccatctctgggtgcttttgtgctggtaaaatttgaataaagtgataaaatatttgtttctaaaaggaaggagaaattcttggtcgataacttataaatctgagggttgaatgattgatgaaattaggggtactggaaagaacaaagagaagcattatttattttgaagcttttctgtatagttacaaagggttaactaggttagaatggtccatgggctgtttactttgcttgcatgtttattttgatcttcccaagaacattcttctgttcatctttttagtatgttattggaaacagagtactcattagttcttactaagtggttttagtttaataaattatgattatgaaataaaatgctattaggtaatatttttataatataaagggccatgtgatgtgagtaagtgcactgttttggaaatcaggggataagggactgaccctgctctcagcatggtatatgatttcaggcaactcacgtaatcagtgagtcttgtctattgagggaatggactaaatcttttctagaaaatttaaaaaggtgggatcacatggtaaaatgtgtataaagtttaaaaaggaaatggtttaccaatgtttatgacaaaaaccagcaaactctttcccacccccccaccccacatctccttttctagtctctaattcctgtacaccaggcaaccacctgtcctctgtactttgccgttttcacctttataatgaatgaattgtttagcatcccctctaaagcctctccattcagttgtgtagaagagctcatcccctttgccttcaagggctttaccattatatttctctcctctttttcttgccttctcaattcttccctctactggattatttccatcagcattactctgattgctattgctgtgtaacagaaactacccaaaacttagtgatttaaaacaactactttattaggctcacagataccatgggtcagtaattgagacagggcacaccagggatgactttgtttttgctccacaatggctactaggacatgagttgggaagaattgccagccaggggtgacttgaaggcaaaggactggaatcatctggaggtgtcttcactcacatgatgggtagttgatgctggctcttgactgggatgttagctgggctgttaactggagcatgtacatgtggcctggatttcctcacaatatggtggcttcagggtggtcacctttcatagtggtgagtagagaattaaaagtgagtgtgtctcagcataaatcttttatgatttagccttggtagctgcacagtataacttctgccatgtcctactggttgtaagggtcagaagcctgtccagatttgatgggggagtggcaagttcacactgcagaagaaaaacatgtgagatgggaaatagtgttatggccatctttggacaattattaatactattgccatagtttgccattttgccaaacttcacatccctcctgtatctgaaatacacgcaaaatacactgagcttctcctcaaaggtccctaattcacatcccatcatgacagtaactcagagtccagtatctcatcatataaatcaggtccaggtacagaatagttttcttgggtatggttaattggatatggttcttcttgaactgaggacccatgaagagacagtttatatgtcccctgcatactttacaaaatggaaaaggcacaggttatctgcagtagacattcctcctcaagaagcatgcaaggtaggcacagtctgtagcaattctgcaacctcactgggcacatgttgccagttccttgattaggtctcagtcctgcttcctggaagtcattcttaataggacataggcttcttctgtttttgggtttaccttctgaattatttatctcccccacccctgcacccaacccatataaattgctttgtatttgtaagagtagctttctgagcttgcttcctgcctgtagtgctccagagtccaaaggcccccttttatatagcaactgtccctttcattccaagctaatacaactcctttaaaaactttgtggacttcctgtgtgtaagtttataatctgtactgccatacccacaaatctcttttgagaggaactctttcctcccctaagctctgtgtgagtctgctgtgggacaacacccttaagatccttagataatatttcgtctgaaaggatctatgaggtactgatttagatcttaagaaaggatcttataatcacactctagattggatctttgctctgaggccctttttatttgacactttgctggctgaaaagattgttctgagtccattacatctccttgaaattctactcaaaaaatgaatagcttattctttagttcatctctctgttctctcaattataagggcagctagaagaagccaaattgctttaacttcctgctgagaatctccttaattcattaggtcaggtatgtattttattttccatgttaatgtaggtgacagttttgctaaactttgccctagtatgtaacaagggtgtcctcttattcagctttcactatcatttctctcactttgcttgaagtcctcactgacagtctccttgagggctcttaggctcccatgaagtttcctcaagaccctttacatgtgtgaacacaaagggtccttatctgttcctggctatatagcaggtccttgaataactgtcatttcttcataacgttgataagaaaaaaatggattcctggctggggccactgtttgtgtggagtttggacattctccccacgtctgtgtgggtttttccgggtgctccaatttcctcccacattccaaagatgcatatgttagtggatcggtgtgtctaaatggtctcagactgagtgatcatgtatggatgagtgtgccttgcagtgggtgatgtcctgtctagggttggttcccaccttgtgccttgagttgctaggataggctctagccactcgtgactgaactgaattgggttaataattatcctacttgtttttattagtctttcttaaatgtgtgtatagctcacatttatttcagtgtttaataatcagagtgtttggaatctttacttagaagtttgatgatgtttttgtggccataaatatgccataggaacttccttatctcaattagcctatggaaaaatggattttgttacacattgtttcacttaaagtcacagtttccaagaacctattgaagacagtgaggattaactgtactagaactgtttcctaacccactggttcttatcagaattacctaaaggacttattgaaacacaaattgccgctgggccccacccccagagtttgtttcattagctctggagtgggacttgaggatttgcatctgtgagttcccaggtgatctgataatgttgatctggggcctagattgtgagaattactgatttaaaccagggattggcaagatttttctattaaggatcataaataaaatattttagactttgtgggcaagattgtttctcttgcacctactcaattccgcctttgtggtgcaaaagcagttatagacaatacgtaaatgaacagacgtggctcatggctgtgttctcataaagctttatttacataacaggcagctggctaaatttggtatgtgtgaactgtgctctgccaattcccaatttaaatcattacttgactccacatctcttcaagctatggccccatttttcactcccctttggaacaaaactctctgagagttgtctgtatttgtctctttttattctttcataaaaaaattatctattttttgaacacatttaaatgtcttagaattcaaaaagtagtaaatatctttgtacatttgtcagggcgtgtgtgtgtgtgtgactataactaaagattaagtagaagaggagttgctgattcaaaagtggtatatgttactaagttcaacaaatattgccaaattgacatagaaataccaagttatgcttttctacacctttactaacattgtgttttcagatgacttgattgttgccaacttgagacgtgaaaaatagaatctcattataattttaatttgctttttattctccttttttagggaactcttcactcatatcttggcccactttctattggatttgtggtccttttactttgctttgtgggagctcttatactaaggaagatagctttgagtttgcgaaatgagttgttttccctaggttgtctctttatctttttgattctgtagatagtgtgattttgttgttgtgcatctaggtaggttccttctaaccctgaaattatattttgagattctcccttgttttcttgttccatctggaatttatactgatgcaagatataagatgggacgcaacttttttcccctagatggttgtccagtttcaatactatttgtcagataatccttcttttctctgctgctgtgaaatgctggtgttttaaattgtgtatgtagttggatctatttctggactttgtttcattctaaaaatggctcctctgaaaccatattgtgagttcttgggtagtgaacatttctatttatttgtttccaagtcctgtataatatttattagcatatgggaggcattcaagtacttgaaaataaaatgaataaatcaagcatttaggaatagaagcagatctttttgccaattattcattttagttattctatttaattctctatttctgattttaaacttgaatttaaccttggttttccattttagttttaccttttttttaaactttattgtgaagtattaagttattttttgtacttactgaatgggcatttgctaacttatgtgtctgctcttattagtctatttttggcctcaaattgttaaaaattcacagtatagttttatttgtatcaaatttgctactgagggaagcttgtcatttcataatggcaatccataggataggtcaagtcatttgagattggaaccattaaggataagttcatttaacattgaattattagatctgtggttaattggccaggttagagaagacagaattacagggaagtctggattttacaacttattattttagagggtcaaatttagaataatatttttaagctttttaagtagaagtatatggatcacctgaggtcaggagttcaccaccagcctgactaacatggtgaaaccctgtctctactaaatacaaaaaaatagccaggtgtggtggtgcatgcctgtaatctgagctacttgggaggctgagacaggagaatcgcttgtacctgggaggcagaggttgcagtgagctgagatcgtgccattgcactctagcctgggcaacaagagtgaaactctgtctcaaaaaataaataaataaataaataaaaataaatacataaatagaagtatactattctgattctcttatttatatgtataatttatttttttaaatacatgaggtattgtagattttttggtttttttgaggaggggcgggggtgatgtgaaatatagttttcattgcatcagatcttcagttgtaatgatattgctggaatccaccatttaggaccctgtcttgttaaaaaaaaattatccttgccttcacccctacccctccctgccacagacttttaaaggtaagtattctgcgataattggattatatttactattatgaaaatttaaaattattagaagtaaaatgaaatatacctccattgtagtaagtttgattcacagtgcctctggttatggtggtcagtaaaagtaacactgtattaggaacagtcttcatggtgggagttctctccttttactcttctgttagtttgttctttttttttttttttttttttgagatggtttcactgtcactcaggctggaggacagtggctcgatcacggctcactgcagccttgccttccctggggtccagtgatcctcctacctcagcctcctgagtagctggcactgcaggcgagtgccactaggcctggctaatttttatatttttttttgtagagatggggtttcaccgtgtcactcagtctggtcttgaactcctgggctccagcaatctttctgcatcagcctcccaaagtgctgggattatggttctggagccaccgcgcatggcctgttagtctgttcttgcattgctataaagaaatacctgaggctgagtaatttataaagaaaagagatttaattggctcatggttctgcaggcttacaagcatggggctgacatttgctcagcttctggggagtcctccgggagcttttactcatggtcaaaagctaagagggagcaggaatatcacatttcaagagctggagcaaaagagaatgtggggaaggtgcacacacttttaaacagccaaatcttgcaagaactcagtatcttcaggacagcaccaagggggatgttgctaaaccattcatgagaaatccacccccatgatcaagtcacctcccaccaggcctcacctccaacattggggattacagtgcaacacatgaaatttaaaggggacaacatccaaactgtatcaaccttgctgtacccctcagcctcattttataggcaacaattgaatatattggttttataaaggtttgatatggaaagattcattaggagtggattttaggacttggggaatgactcagagaagaaaatagtgcatgatagtataagtctatctgattgatgagtaactggaaatccttccaaaacataatgcttcagtgtctgcagaattgtttcatttccatgtttatgtatttcttattgtttccttgtttatccataggtgcttaatttttttttaatctgaatgcattatgataatctttaaataattatttcagaggaatatctgaaatattcagtgttcttctagcatggcagtattttaaaaatcattatgagcttaaattcatactgatttaaacaacttctagatttttttgaatatcaatagcagagggtagttttaaatatttcacgagcagaattaattaaatttcctgtgcaattttattttttatagacaaactcgtcacttcttaaaatcttttaaaaatgtcttggtaatacaggcttggaatatgatggtattgaaatgagatcttaagggaaaaaaaactccaacgggtttttttgttgttgttgttgagatggagtcttgctctgtcacccaggctggagtgcagtggcattatctcagctcactgcaacttctgcctcccagattcaagcaattctcctacctcagcctcccgagtaactgggattataggcgcgcaccaccacgcccagctaatttttgtatttttagtagagacggggtttcaccatgttggtcaggctggtctcgaactcctgacctcgtgatccgcccgccttggcctcccaaagtgctgggattacaggcatgagccaccatgcccggccaaaaactccaacttttagaggcctatttacagcacttgtcccatatttgttcacactttttctgtatgtgtgttgtgaattataaatctggcttttcctacaaatgtggcttttcctgtgtagtcatcattaagcatgattctaagaagtagctcaaaatctcctaagaccaaaaaccacaaaaaacaaaaaaaaaaacaacaaaaaaccaaaaccagaaaagggatacattttgcagaataatttatattttcttctcttcatggcatcagttttctcaggagttctttttttgagatggagtctccctctgtcacccaggctgtagtgcagtggtgcgatctgcaagctccgcctcccgggttcacgccattctcctgcctcagcctccggagtagctgggactacaggtgcccgccaccacgcccggctatttttttttttgtattttcagtagagacggggtttcaccgtgttagccaggatggtctcgatctcctgaccttgtgatccacctgcctcggcctcccaaagtgctgggattacaggcgtgagccaccgcacccgggctcaggaggtcttttaagcttttgcctgtcatgtgtgtacttctgacgctggcccaaggtaaaatgattacatttgacttcggtagcccttaaatgtatggctgttcttaatcttttctaaagcctaaaagttgaattagtattcatcttagatttcttgtttcttaagtgaaagaatcatgacattgtattaaaatatcttatttgcatgtattttatatactgttttaataggcagtagtagtatacaagctttgaccaaatgtctcttcatataaaaaattcaagtgaataaaaacagtcatttaaaaatgacattagtcaaaggggcaaaaaagattacaaatgcttattgtgattgacagaacttgcttaacatattagggttctctagaaggacagaactaataggatatatatatgagtttattaaatattaacttaaatgatcacaaggtcccacaataggctgtctgcaagcttgaggagcaaggagagccagttcaagtctcaaaactgaagaacttggagtctgatgttcaagggcaggaagcgtcttggctaatccacccatcttggcctcccaaagtgctaggattacaggcgtgagcccccgtgcctggtgtacatcatttttaatatctttatagtattctgttggctaagttgccacaatttatcagacccctttaatgtcattaattttttcccaatatttagacttgtttcatagaattattagatatgcatgctactactcctgtcctttttcaaaggacaattattagatattcttgttttcctcatatctttgccaacactgggtattggcattcttcttgtttaccagtcagctaaggaagctaaggaagaaacaatatctcatttttatgtacttttctctgattcttaattatgttgaccatgttttcatttcttttgtgaaatgcctatttatgttcattttcatattaaattgtaagagttacttgtataaatatattaaacctttgtagtatatattttttctgtttttttttaaagttttgattatagtgtttataatatgcagtcaaatttacccatcttttatttcctctatcatttttcacttagatgtggggtttagaaaggaggtacataatgtgacagagtttttggtatagaaataactgacatagttagatataaaacataccaaggaaatagtcggaaatgtccaatttcgaatgtgtaaggagaccagtaagaaaatcatgaagaacagctaacagcagtaatttttaaaagggtatttacaaacacttgaaaatgtttatgtagtttaaaggaatgattcaaatataaagagaagcgtaacataaaaatgaaataaaggcatatatatagtcattgtgtagatggttttctagtaacagttataccaagtttgaaatgatttttaggctttgttatgccaacttttaggagttttctttttaaactttttgagcttatgtttcatcatggccaatttttataaattttccctatatgctcaaaacatttttttagtggaaggttttaatacgtctgtaatttctccggtgtcttaaaaataattagtttgtggagctctttgtgtattggagataccatcttcttgtttgatatatttgtatatgtattaagtaagaactggataaagaaggtggttgggatatgtataaatatcaggtaagaacttgataacgtattggttggtttgcatatgaaaagttgccctcactgtcaggttctttcctgtttctaggaattggctagccctggaaggactgccccttccagggtcagcaaattcccaagatagcaaagcatcaaaaatacagaataaaaagacatgcttagtagagtatatagaaatacaattggttttgtttattttgtgatgtatcctgtgatactggtaaattcatttataagttctagtaattttttggtagaatcctcagcatttttgataaatacaatcatgtctgcaaataaaaagttttatttctttcatttcaatctctatgtcttttatttcattttcttaccagattgcattaggtagaacctccagtgttgaatagaaatggtggtggtgagcatcctttccttgttcctgattttatggagaaagcattcaatatgtaatcattaagtaatagaaggttgtttgtagatgatctttattttattgaggaaattcccttctttttctaatttatttccagaaattttatcatgaattggtgttgacttttgtcaaatgcttttcctgcaacaattgggacgatcttatggttttgctccattattctgttaatgaggtaaattgcattgattcattttcaaatgtcaaagcaaccagtatgactggaataaaacccacttggtgatggtgttctgacctttttatatgctcctggttctatgttctattattttgttatgttcatgagaaacatttgcctgtaatttttttttttttttatgatgtgtttttgccaggttttggtattaggataattctggccacataaaatgatttggaaattatttctgcccctctgttttctgtaagagtttatacagaattggtactattttttccttaaatagttgacagactttcccagggaagtcactttggccaagagttttctttgtgggtatgtttttaatgaagaattcaatttattgaagagatatgatactattcaaggtttctgtttcttcctatgtcagttttggtaatttttgtctttcaaggaatttgttcatcaaatctaacttgttaaagtcattggcatgaagttgctcctatctttttatatccacttactgtttataaaatctgtagcgatatcctgctttttttacatcatatggggcacatattggtaatatgtgttcttttctgtttgtaaattgatcatcttagaggtttatcaactttttaaatcttttctaaaaacaaagttttggtttgattgattttctttattgttttatatattattaatttttgttctttattctttcttcactctctggttttgttttctagctacctaggaagcttacataattaatttcatatctttcttcttttccatcataagcatttatagctatacattctctctaaccactattttagctgtattcccccaaattttattgtttattatcattcaggtgaaaataatttctgatttcccttttaatttcttcttcgaacctgggattatttagaactatgttaattttgcaatactgggagattttctagatagttttttgatatttatttctaattcaattttgctatggccaagaatataattcatattaattcagtcttttcaaatgtttgagaattggtttatggaccaacctatggtataacttagtgaatgttctgtgagcacttgaaaaggatgtatgttctgcagttgttgggcattgtgttctgtaaatgtcagttatatttagttggttgatgtttaggtcttcattatttttactgattaaaaaaattttttttgttaattcctgagaaatgagtattgaaatttttagtgtaatagttgttttatttccctctttacatttttgcttcatgtaattggaaactattattgtgtgcatatatatttaagaagagtaatttataaatcttctatgattagtgtttttatgttctgcttacaagaggtcacattggtctgttttccatcttaaattaatatttgtgtaccgtatgaagtagatagaagttaaggttattttttgccccatatgaataaccagttgactaagccacatgttttgaaatgaccaatatttcttcactgaaatgcaatggcacatctgttccaaattaggtaactgtatgtgagtatgtttttttggactctattctgttccatttgtctatttgttcatttttgtgctaataccaatctgcttgttctatctttatgataaatcttgatgtctgataatataaatctttagtttgctcttcaagattgttttggctattgtaaatcctttgtttttcacagactttaggatcaacttgtaaatttccacaaaaactgctaggattttaattggaagtgggttgaatctatagattaatttggaaaagaaccgacatctgaaccatactgagtttttctgtattcttatatcagcatggtctatccctctcttatttagctagcatttattttttgtagaaatgttttacagtttttattgcacagtttttacagatatttccatagatgtattcctaggtatttgattttttgttactattgtaaatgatactatttttaaatgttcatttaaaaaattgtttgcttctgacatacagaaatgcagttgatttttatatattggtcttgcatcttgtgactttgctaaattcactcagtgattggtagattcttttaaatttcctacatatacagacatgtcctctatgaatactgacaattttacttatcctttctaatcatcataacttttatttagttttcttgccttattgcactagccacaatgtccactatggtattgaatagaaatcatgattttagacatgattgttacgtttttgaactctagaagaacaagatcaatattttaccattaggtatattgtttttttactgttaccctttatcagagtgaggaagtttgcttttattcctagtttgagattttaaaatcatgaacattggttaaattttattaggagtagtttctgcatctattgaaatgatcatatggtgtgttttctcattgtgctaataatgtaaaatatattgactatttaaaaaatttttttctaaattacataaaaattgtatatatggtgtacaacatgacattttgttatatgtatacattgcagaatggcaaaatcagtctaattaacatatgtatcacctcacatacttatcttttgtggtgagaacacttaaaatctactcttagcaattttcaagtatacgatatattgttattggtaatcaccatgatgtacaatagatctcttcagtttactcctcctatctaacagaaatttcgtatcctttgaccaacgtctcccattcctcctaatgggaccctcagcctctggtaactgctgttctacttactctctgcttctatgatttctacttttttagattctatggatcagtgagatcatacagttttgtctttctgtgcctagctttatttcacttaatataatgtcttccaggttcatccatgttgttgtaaatgacaagattttcttctttttttaaggctgaattatattctattgtgtacatatgctgtattttctttatcagttcatctgttgatggacacttaggttgattctttatcttggctattaagaataatgctgcaatgagcatgggagtgtagatattgctttgacatattatttttagttccaatacccagaagtgggattgctaaatcatatggtagttccattttaattttttgaggaacctccattcattttccatagtgactgtaaaaatttacattttcccaccaagagtatacaagagtttctttttctccacacactcaccaatgcttgttatccttatatctttttgataaggctcattgtaacaggcatgaggtgagatctcactatggttttaatttgcatttagtgatgttgaacgttttttcatgaacatgttggccatttacatattgtcttttttttttttttttgagacagagtcttgctctgttgcctaggctgaagtgcagtggtgtgatcatagctcactgcagccttgacctcccaagcgcaagtgatcctcctccttcagcctcttgagtagttgggactgcaggcatgtgccagcatgcctggctaatttttttttttttttttttttttttttttttttttttttttttttttttaggtacagggtctcactgtgttgcccaggctggtcttgaactcctggtctcaagtaatcctcccaccttggcctcccaaagttttgggattacagggttgagccactgcacccagtctgtattgtcctttgaggaatatctgttccggtcctttgcccatttttaaatcaggttatttgttttcttgcttttgagttgtttgcatttcttatctattttggatattaactccttatcatatggatggcttgaaaatattttctcctgttttataggttgtcccttcactctgttaattgtttcccttgctgtgtacaagtttttaaatctggtataatgattgatttctaaatgttaactttgcactcctgggggtaaattcatttggtcaagatgtattcttttaaagtgttattggatttaatttgctagtattttgtttagcatttttttccaaatatgtttatgagagagattccagtgtaatttttttccttttcatgtccttacatattttggtatcatgtttatactctcattttaagaatgtgggtaagtgttttttattttctatttcctgagagagtttgtataagctcaatgtttcttcctcagacatttggaaaaatttaccagcaaagtcactgggcattacattttctatgtggaaaagttttaaatggtatattctgagggctctgttctgttccattgatctatatctctgttttgctaccagtaccatgctgttttggttactgtagccttgtagtatagtttgaagtcaggtagcgtgatgcctccagctttgttcttttggcttaggattgacctggcgatgcaggctcttttttggttccatatgaactttaaagtagttttttccaattctgtgaagaaagtcattggtagcttgatggggatggcattgaatctataaatgaccttgggcagtatggccattttcacgatattgattcttcctacccatgagcatggaatgttcttccatttgtttgtatcctcttttatttcattgagcagtggtttgtagttctccttgaagaggtccttcacatcccttgtaagttggattcctaggtattttattctctttgaagcaattgtgaacgggagttcactcatgatttggctctctgtgtgttattggtgtataagaatgcttgtgatttttgtacattgattttgtatgctgagactttgctgaagttgcttatcagcttaaggagattttgggctgagacaatggggttttctagatatacaatcatggtatattcaatttttaaattactgtatttgtttgttctcatattgctataaagagctatctgagactgggtagtttttaaagaaaagttgtttaattgactcatggttccataggctgtacacaaggcatggctgggaaggcctcaggaaatttacaatcatggtagaaggtgaaggggaaaaaagtacatcttcatacagcaacaggaaagagacagcaaaggacgacatgctgcaaaaatttaaataaccagatctcatgcaaactcactcactatcatgagactagcaaagcgtaaatccatcccatgacccagtcacctctcaccaggccactcctctaacactgaagatcataattcaacatgagatttgggtggggacacagaaccaaaccatatcaattatatatagaattattcaaattttatatttcttcttgtgctagtttaggtaaattgttttaaaaggaacttcatttgtttttaaattggagaatattcctgttgtcttttacatgtttcaatattgtaagctctggtaataatgtctactttttaattcccgatattgataatttatgttttatcttctttttttcttgatcagtctttctagtgttttatcaattttaatgcttttaaaaagccaacgttttactttgcttttctttattttatttttatttttctctgatttctgctcttaagtactttcatttttatggtttttggcttaatttgttgcaacttcttgaaatgaaaatttatttaataacattgttcagcctttcttctcgtcttgtgtatgaatttaagattatgaatatcttagtatacacttttactgcgttttactcattttcattattgattcaaagtatttttaaagttattctttgtaccatgggttctatgaaaatatattgattaatttacaaatatatgcgggtttctagttatttttctgtatatgctgtggtacttttgtcagtggttatattttccataagagatttttaatttaggtgccattggcaaatttccattaattcaaatgcagaacttcacatttttcaatgcatacgtgagttttttttgttgaggtattaagaatagcataaatttataaaatattaagtaatcattgaatgcaaaatatgtcctattttgcaacttaatatacttttattaggttgacgctaaagtaattgcgttttttactcatactttaatggcaaaaaccacaattacttttgcaccagtctaataatgagaattattattattattatattgtcttttttttttttggagtggagtctcactctgtcacccaggctgaactgcagtggtgtgatatctgagccttggctcactgcaatctctgcctcccaggttcaagcaattctcctatctcagcctcccaagtagctgggattacaggcacgtgccaccacgcctggctaatttttgtgttttcactggagaacagggtctcactacattggcctggctggcctggaattcctgacctcaaatgatccccccgcctcggcctcccaaagtgctgggattacaggcatgagccaccgcgcctggccctaataatgagaattcttatcaaactgtttacacagaataacatgagtgggtaatggtgaagctgagtttcacatttttatgcgatattcttcagtgttgctatttgttcagtacttttaagaattatataaattttttatagtctatacataaagtcaatattatgggtcccaaatatataaaatgtttgcttgttccattgtttatgttttgaatacaaattatattttgtatgatttcattaataatttgttgagaattttatggcctaacatgtggtctactttctaaaatattccagcttcatttgaaaaggatatgcattcttcagttgttaggtgtttgcttttgattgcttgtatttctcagtcaaatgtaggaagtggagattaagaaaagggctggcacttttggtgattgaggaggagaaagtatgagatagttgtcttggatagtggaagagtaaatgttctaaagaaatataaaatgatagttgagcagcactaagggcccatttgagtatgaatctaaagagggaccaatctgaatgcatgtgttttcatcagtgatttttatatgtgtgggtaaaagctctgagtagacagagataaactgaactcttttagagtttctttgttatctttggtgtttggatcctttgctttgatttgtatcggtacagtttttaaaaaattaaatgttatctcctctcagcagatctttttaacatgaacccagcatctttaacaccaataaaatttcttctattatttttcttccctgtgttttcattcgtcctccatctagagcttctctttagaattgtactccctggattgatcctcttatttcttacttttatgctcataatatttttttctttctgtctgtctctttctctttctgagtctaggacctgggagtttgtcttgactgtcttccaaattatgagtttgatcctttgagtcgtattattcaactctttcactgaattgtcatctatctctttttctttaatgtatagagaatttattatgcacagccacttgcaaactttaacaagtatgattagagcagcattttctataacagcaacacataagttggaacaacacaaatcttaaaataactggaatggatgagcaaattgggtggtccgaggctcagacatcagcaggtgttaaacacctgtgggaaaggagagaacgatccatttatttatttctataggaaatgcaaaagaggcaaaattaagaaaaatactgcttcatgataaagaataaagccgtgaagaatatccacaaaattgtgtatagtggctacatctgatacagaatggaaacagccaggatagagcagcacaggaacactatgaaatgcccaggctgtcttcattactagtcaggatttttttttttaattttgtaaactttatttattctctgctcctttttcataatctagtgatgctttatgttttcaaaatattcttaaatctctctgagaataccgagaaagattttaaaccaagttatcttccctgcattatctgtttcttctggggtcagttgttttctggtccattttggtcttactcttttattcctacaacccctgccccatccccatcctaactgtaataatccttgataatcattgcatatttatgctttttatgtgtgtgcagacaactgtttttatgcttatagatgccttcctctgtgtattttttttcttcagttaaaattttttttttttgcagtcacagtcttgctctgttgcccaggctggagtgaagtggtgccaacctagctcactgcaggctcaaactcataagcttaagccgtcctcccatttcagcctcccaagtagctagtactacaggtgcacactacatgctggctaatttttagatttcttttttgtagagacagggtctcgcaatgttgccggggctagtcttgagctccaggctcaaacgatcctctcgccttggacttccaaattgctgggattggaggcatgagccatcgcacctagcctatgtatgttttaaatagagtctatttcctctactctgtcattctagtcctatctacttttgatcttcctggaattactgtaaatttctgatttgctgatagcaccttttcttatttgtcggagccgccatgaattcgtttatataaacttttaattttactccttttagctactgttgttacctgttttacttttatatctattttaagccctaccatacaccgttattattcatgctttaaacaattgtcagttgtcttttttttttttagacggagtctcgctctgtcgcccaggctggagtgcagtaaacatgacctccgttgcaacctctgccttcggggttcaagcaattctcctgcctcagcctcccgtgtagctgggattacaggcgtgtaccactatgcccggctaatttttatatttttagtacagacagggtttcaccatgttggccaggttggtctcgaactcctgacctcaggtgattcacccgcctcggcctcccaaatgctgggattacaggcgtgggccaccacgcctggctgtcagttgccttttaatacatttaataaatggaagaagaataatattataattaatcacatatttactatttttgagctcttcattcctttctgtaaacctgagtttacatgtaatatttcctttaatccacatgattttctttatcagttcttgagtgtgagtttgttggtgatgtactctctcagcatccatttatctgaaaacatatttgttttgccttgaattttgaaaattcttattttttataatacaacagatccagtagtatgagaattatttttcaggattgtagaattctgggttgacagctttccccctctccctaccagtactttgtcttctggcctccattacttctgaagcgatgtcagttctatttcttgtcttggttctcctgtatgtatgtgactgcttttaagattatctttttgtctttggtttttagcagtttggctataatgtgacttaagtatggatttgtatagattggattcagatgaactttttggatcggtggtttgatttttttaaacaaacttggaaaacatttagccagtattttttcaagtatttcctctgttccacttatatgtatcagactttgttactcttgttgttcagtggtgtgatcacggctttctgcagcctcaaactcctgagcgcaagtaatcctcctacctcagcctcccaagtagctgggactacgggcacagagcaccatgcccagcaaattaaaaaaaaatttttttgtagagatggggtcttgctatgttgccagggctagtcttgaactcctggactcaagcaatcctcctgccttggcctcccaaaatgttgggattaaaggcatgagccatgactcctggcctagatttcttgatattgtagagtttacatatggcttctttatcttcatgcattatattaattttttactgtaaattctattacatatgtatcatagtaaacaaagtctttaaaataaattctaatatttgggtctgctttgggtccatttctattatatatattcttcttttcatgtttaataagtttcagctgactattgtacattgtgggtgatacagtgtagaaactccggatgatgtggatttcaatctttctctgaagtaatgagttttgttctagcaggcagttaaatttactagcagaccaacttgatcctgcggaggcttggttttaggctttgttgggacaggtctatttcagttttgccattacttctggtaagtggctcttattcttcaagtgtggcttttctggcgtttcagtggaaagcctgagatatttaccagttccctctaacactaaatcctgactctccaggaccagatagctgttgaaatctcttcccagttctttcagatttctagctattgcctgtccctgggcttcgattttcatcctatggatgggaattcaggagtcaggccccactgactcccattttcctgagatttctgccctcaatttttggcttttctagcagctccaaacttcattctctgatactttcacccagtaagactgcagctttttacaagagctctgtcccctcctctggcccctgcctgtacacaacagactgtgtatgtagttgtctcaggatggaagaagagtaagtatgggcctcattcagtgtattccccttctttcaagggtcatatccccccgatttgtatctgcttttgtttctttgacaatgccttcaaatggtgtttttataaatatatatttttaaaaagtttataattgtcgtcatcaggaacattagtgtagtataaactactctctcattatcaaaaatctgtatgttaaaaattacttaaaattgttgttatttatcatttccttggtgtttggggcagaagggaatgcacatgatttttctgaacttctcattaagggaggcaacccagccttggtctggagatcccgaaattataccgtatgtataataaaataattattttgttatttttatgagcatagcattaataaattaaatatttagtaagatttgtatctcaggatttttctacctgctaagaatagatcgtttgacaaggcagatgaggttctttgttgaattataaggtattgaagcctataatttagtagtggaaagagcacatagcaagagttgtatgatgaggttggagaggtaagcagcaaacagataatggaattttagtctaaacattcgtaaaatatgagggtggctcctgtgggagattaggttattgggaggcaaagtagacttagggaaaatagttaggaggacattgcaatagttcaggagagaaataatagctgtttagtgtatgatggtagttgtggaaaaaaaagccaatggatggatttgaaatatagtttggaagtaaaactatcagtacatattgatggactggatataggggtgaaaaaagagaagaataaaggttgaccaaattctttattatctcaaagtatgaaagcttgttaagacctcttttctgtttgtattttctttcttgctcaataagaaaacaacccaaagcactttttttctaataacttatatcttcttcttttgtgataaaaaaaaataggagtggtctttagagtacaatacaaaattcttttacatttcacctcaccatatttaggtttaccaaagtagtataggaataattgtaggaaaaacatagtatatctacttggactataaaattttggtatactaaagaaagtaaatcaaaatggttatatcttgcaatagaatgcaaaatcacatggatattaaaggtaaacatttaaatgtattttatattcttggcttcttcttcagaccactccattgccttttgggacatttctgtggaaaagttgagaagcactgacctatctgaaccttccaatccagccaaacttgtctctactttgttccaggaacatgctgtgtacattcctctttccatgttttgcatgcttttctccctgccaataatgccctgtttttcattacttgtcaaaattctattttccttttaaggtccagcctatgttttaattgttgtgtgaaacttctaaaacctttctttgttttaaataattatgatcattttcttcttgtcattttgtagcacttaatttttaaaatttattttgtacttagatgatgtgtaatttactataaatcatagatttttaagaattgggaggaacagcggaaatttaattaagtaattttattatacaagtgaggaagctgagattcatttgtcatgtaagtagtttgcaataagaaaggatgaaacttatttttaggtctcttggctcccaggttagtaatttttctaatctactgcattacttcttcatgtatatttattgatctgaaaagttgtgtctcttagaattatgtagtatatgagtaaagtttgaaaatatgaacttttaaaatgtgatatttgaggtactggtttttgagtgtatgtgtacagttgattaaaatttattataacttttatttactctttctttttttttttttttttttcgtagagacaggttctcactatgttgcccaggctggacttgaactcctgagctaaagtgatcctctcaccttggcttcccagagtgcagggattacaggtgtgagccactgtacccagcctcttatttactctttattcaacagatttgttaatcaacacatgttgaccagacttaattacagcttttatatactcttcatttattcaacaactttcatgtgtcagagagtatcctaggcactgagtgcagtagtaaataatacattaaggttcttaccttcaagaaactttcattctagtggtacaagacaatgagcaaaatcataatctaatctatggtgggaaaatatcagaacagctgtggccacttgagtggttggagcagggactgatggagaaggagcatggaagaactttctgggatgctgataatttcttagggctttgggttacataggtatatgcagtgtccaaacttattgactggtacacttaagatttgtgcatttgattgtatttaggagggaaaatcctgtaaaactagaatagatgtaacttatatgagagttataaatgacaatatgttaaacacccatgaaactaccacccaccccaggaactagaatgttgccagcaatttgcacctacatatgtgtttctccctagctattctcctgtctatcttgcagaagtaaccattgtgtattgtattttgggattaacatttccttgattttttattttttttttgcgggggcggggggagatttgtttaacacatgtatatgcctaaacaatgtactattcagttttgcttgtttttgaaatttagaaaaacggtattttacagcttacagttttctataatttactgcttttgcaacattgtatttttaagatttatccatgttgcataaagctatagttcatttattttaacaactgaggaacagattctgtagtataaatgcacaaaagtatttacctattttcctgatagtttgggttgtttgcagtttttgccattggaagctgaggcgcaatgaatattcttgtaatgtgtctcttggtgtaaatatgcatgaagtttgtaactagacgtagaattgtagcagttctcagaacgtggtctctagaggatgcctgggtatcctaaaaacctattcaagggtttaatgaaattaaaatgattttcataataatgccaagatgttaaatgtctttttcattgagttgacatatgcacaaatggtacagaagtaatagtgagttaaacggctggcaccttagcacaaatcaaagcagtaatgctggttgtagttgtgatcattgtattctttttctttttcttttcttttttttttttttgagacaaggtctcactttgttactcaggttggagtgcagtggcatgagcacaatcactgctcactgcggcctcggtctcctgggctcaagtgatcctattgttttctttctcgtcatgtacttccaggaaaagaaaaaagccaattcgagtcacttattcttttgattctttttcgtagcaaagcatcaatgcattttctaaatgattgaattcatttaaattcgggaaacatttactgagtgcctatggaattctgggatatgagtgtatgtttaaggcagtgtgatttccagttaccatcctttctgttctaaacacgattgtgtcatattaaaatataaaaagagtaaaaaatatcctgaataaaaatagatcaagctgtacatatatatagattataagtgcaaaatactgagtgtggttaaagcctatgctatgcttgctgggtttcctgtacagaagtaggcattggagacagttttgctcttgtggtacaacatggatgactagaggcaggtccaggatgttacttttactgccagccgtcgcttccctccaaatagactattggaaggggaacctcccgccaaacgctgcctactgctatagtgttggataagttgcaagcttaggaagatgagatgacatgatttaggaacttcaggatgaagtgaagtatctcctgccttgtgactgactggatctgcatcgtatcagatacctcctcaaggcaggaattttaacctgctgttataagacctggttctatatatggatagcccaggtaggctaagttgtggcagccacagattgttagatgaggagggacaccacagactgtgtatgtgtgtgtgttgagggcaaggtgaggtgaggaatggtgcaatgagcctgcaaaccaaattgcaaaatatatgaagaaatgtagtgctaagaaaaatagtcaacaaaattaaaaattgaaaaatgaattttttcctgataaaatttaaaaatgtaagtaaacctctaattgaagtgtaacacacaaacaggaaagtatgctactcataaatgcacagcttaacaaattttcataaagtgaacacacctttgttaaccactacttagatcaagaaatagagtatcacctgaattactggcaggaggcaccccagaggtctccctgtacctcctgccagttattctccatgccctcccactatcccaaccctgccaagctaaccattatcctaactttttttcaccatgagaaagaaatggaaggatatggaagtgagcttgagaggcctccatggtcagtgaacagttctgctaaaataatttagagggaataacaaagaagtagcatttgacggcatagtagctgagaatttcctagaatagaaaaaagacatgaatctttagattaaaagtatgtagtcatttttgatcaagataaagaagaatctacatcaaaacctttccaaaaatattgcagaacattgctgctaatgcaaacaagttttaaactacttgagggaaagccatgacatgtaggagtgatagcagacttcatatttatgttaatagataccacaaaacaatgcagtaatatctttaaagttctggggaaagaaaattataaataggattttgagagtgagggcaacatatttttttcaaagactacaacttaaaaacccacagagccccactgaaaggtctactaaaagatacatttcagcaggaaaaagtgagtcctgaaggaagacccaaaacaatgatgagcacaaaacaatccaaagtcagtggtgggcacaaactgataaaattctagcaaatttactccttaatgctaagaacttcgtttaaattaactttctatcttttcagaaaaccaactcttagatttgttaatcttttccatcatttttatagtttctatgtcatttatttctgctgtgaacttcattttttccttccttctgttagctttgggctttgttcttctttttctagttccttgaggtgtaatgtaatgttgtttgacatctttcttcctttttgatgtaggtatttattgctataaacttccctcttataactgcttttgctgcatttaatactgactataataagatacgatgtaatagatttcaaggaattatgtatttttgaataaattaattctttaaagttgcatatccagttgcagatgaacttcaaaaatcttgcagttttatatctgttacagtaattgccaggttttgttgttgttgttttgatacattagaagttctagaattgttatatcctcttgatgaattaatccctttatcattctagaattaccttgtctctttactgtttgtgacttaaagtctgttgtatctgatatacctttgcatggaatatctttttctatccctttactttcagtctatgtgtatctttaaaggtgagatgaggttttgtaagtggcatgtagttgggtcatgttttttagtccatttagccattctctatcttttaagtggaaagtttaatctatttacattcaagtttattcttgatatgtgaaggcttattcctgtcattttattaattgatttctggttgttctgtaggtcctttgttcttttctttctctcatattgtttagcattgtggtttgttggttttctatagtgataacatttgaatcctttcttgtctgtgtgtgtttgctttaccagtgggtttgatactttcgtcatctgtttttcataatggtagtaattgtcctttttgtttgtttgtttgtttcttttttgagacagggttttgctcttgttctgtcctccaggctggagtgcagtggtgtgatcatggctcactgcagcctcgacctccatggtctcaggtgatccttctgcctcagcctctcaggtagctgggactacagaaacctgccaccatgcctggctaattcttttgtatttttcgtagacatggggttttgccatgttgtccaggctgctcttgaactcctgggctcaagcagtctgcctgcctcagccacccaaagtgctaggattacaggcttgagccactgtgcctggcctgacattgttctttgacttccatatgtagaactccctcaagcatttcttgtaggtctggtctagtagtgttgaattcctcagcttttgcttgcctcagaaaaactatttttcctttgcttaatgaaggataattttgctgggtatagtatccttgacttgcaggtttttttctttcagcacttttcatatatcgttccattctcttcctggcctgtaatgattctgctgagaaatctgctgttagtctgatggagcttcccttagaagtgactagactcttttttcttgctgtttttagaattctctctttgtctttgacaagctgttgtctctgacaacagttctctctttgtctttgacaaactgttgacagtttgactctaatgtgttgtggagaacctgttggaattttgtctttttggggatctctgagcttctgtatctgaatgtctaaatctcttgatatacttgggtagttttcagctattatttcattaaccaggttttctattccttttgtattttcattgtcttctagaatactgaaaattctaatattagtttgctttatggtatcccatatgtcatgcaggctttgttcattcttttttctttatttttgtctaatggggttatttcagaagacctgtcttcaagttcagaaattctttcttcgtagatgctctagaatgtattttttatttcattaaatgaattcttcagtttcagggtttcttgttttctttttaaatgatatctctctctttggtaaatttctcattgatatcctgagttgtttttctggtttctttgtattgtttatctgtatgcgtttgtatctccctgagcttctttaatatcattatttttaattctttttctggcatttcatgaatttcttttgcattggaatcttttggtagaaaattattttgatcctttggagatgtcatatttccctatgttcccatgtttcttgtgaccttacttctttgatatccacacatctggtgtaatcatcacttccatttttttgaatttgctttcatagggtaggactttttcctgaagatttgactggggtgtttgttggccagggcactttgggtttgaatctgggtgcatgcagtagtgtagtctctgtaagattttttttcctttgtaaacagcatcagtggtgtctgtgatttcctcagtggcatagtgtgtggttgtggaggctgtggtgaacttttgctggggatggtgacaccagctggactgatcctcagtcctcagttgtggcagcagttggacaaccatgcctgtacattagccccagggtggcttacattagtaatggtgttagtgggtccaggcagtccaatttttgggtctccaggtgacttgtttgggtaccaggagtggcagtgatgggctgggcagctgagtgggtccacaggcccctgggcagtgagcatggcatgggttatgtcagtagcagtggtaggagaacctctggctgtccagttgtctgtgcttatgtcggcagtgacggcgattggctgggtaggcaagtcctaaaacctgcaggtggcaagtgtgagtgggaaccagctgtggtggtagtggcaggttgggtgggccacatcctcagacccccaggtggaatgctcagttgacactggacgtggacaaactggtgcgatcccaaggcccccagataacatgcttggatacgtgggagtggggtgctgagctgggcagggtgagagtatcctcaggccctccagtggtgttagcaggtgctgtttgtggtgggcaggagcaggatgatttccaatttcctggtggaatgttcaggtgggggcagcagtggctgtgctgtgccctgatgctggggagggtgcagttgctgtcagtgggagcagttgtagggagttggctaaggagtgtgcactgcagctgcaggtggaggctgtagatgtgatgaagctgtactcagggtgcatgcaaatttgcattttgacacctagcggcagcagcctgcaatggtggcagctgtaggtggtagagcttgtcctcagggcacataccaatatatggcagcccttctgctgggagcagtggggttattgccaatggcttgtgctttggtcccagaggcggcagccagcaatggaggtgactgtcggtggaggatgtcagtggggctctaggggtgtggatatgcaggggctgttgggctccagggtaggaggcattctggtgtgggttgggctttaaaaatggcaccgtgctgtagctgcttaggactcaggggtgtgttggaccagcataagctccctctctaaagcaatgtcattgtgcagtctccaggcagctccctatgttactcccagggcccatgaaagttgacgggctctcttgtgtctgggattgcaggagtttgcagtgaaaatgtgggccactgggagtctctcacttactctttccccacattgtgcaggctctctaggcttctggctgatcctggctgagcaggctgccccacttccctctccttccttgcattaggtgttttctatcacttctctgttgaatttccgtgttctctcttagatgacctattcaaagtgtgattatctactcgctattttggttcttctttgtggagcaggtgagtaccagataactctagtcaaccttctggacccctcttcccccaatttgagatctcttcttctgttgtctgtaactgagtttaatgcttgtttgttcatgttaggattttatatcatcgtcctcaattaggttgttaactggaattttataatctttgtccacaggaagtttaaaatgtatgatttcttgcattgtgctttgtatgtagtaatacacgatatttatccagttaatggatttgacagccattgctgtcaaggagcagtccttctttgtgtatgaagggtgccttatcaatattatttccatttgtaactttatttatttatgtattcatttttgagacagggtcttgctgtgtcacccagactggagtgcggtggagtgcggaggtttgctgcagcctcatcctcccaggttcaagcaattcttccgctccactcccagagtagctaggactacaagtgcgtgctgccacgcccagctaatttttttcttttgtatgtttttgtagagatgaggtttcaccatgttgctgaggcttgtctccaacttctgggctcaagctatctgcccgcctcggccccgcaaagtgctaggattacaggtgtgagacactgcgcccagcccatttgtaactttattgttttctcttacaggcaaatgttctgaaaaagactctgcatgggaatggcctgccttacgatgacagaaatggagggaacatccacctcttctatatatcagaatggtgatatttctggaaatgccaattctatgaagcaaatagatccagttcttcaggtgtatctttaccattcccttgggaaatctgaggcagattatctgacctttccatctggggagtatgttgcagaagaaatctgtattgctgcttctaaagcttgtggtaagtattaaaaaacagcattttcctttttatgcatggattgttttaattatgctatgctaatactaggtacatgcataatatatatttttatttttttaatgcttgtatggctggcgtgtgtgttttcacatgcatagaaaatgaaagtgttactggagtacaatttatggtgaatctgccttgggctaggtatcaaaacaaattgatgcccataaatgtttgctgactattctttataattacatataaggtggttaaaaaatcctgtcatgggctatctcatgacataaggtaatattaaagctagatcctgagagcaacatgaaagcaaaaaattaatgttttgaaatatgtatttgatttaaaatcttgattaaatggctgacaaaccatcattttcttctagttagcttctgaagacctctgccaatctttcctcatatatatttcttatgtctttggtgtatcttgaaatcatttttactcttgagacctgattatattatctatggaccaaaactgtgaaccagagaactctttctatagagctaacacattttactagaccactgaggttactatagagcctactatcatggtatctcatttttaaatgttcttttaatagaaagactagttgacactattttgaagaatagtcgtatgattttatttgtagaggcaaattaaatgtctaatatagtatttataagaatgtatgattacatcaatttattctcttatttaagatcagtataggtcagaataaccattaactgtaagttggaggaagctaggtacatttcaagttccttctagctattttgaaaaatacaatacattgttgttaactatagtcaccctactcttctatcaaacatttgaacttgttccttctgtctgtatttttgtgcccattaaccaacatctcttcatttccctcttcccacccatataaccttgccagtctctgctaccaatccactctaccttcatgtgatcaactttttagctcccacatatgaatgagaacttgttatatttgtctttcagttcctggcttatttcactcgacataatgaccttcagttccatccatgttgctgtgaatgacatgattacattcttttttacgatgccactgggccccaggggagtacgcattctgttgtgagctgggcttcaaaatatcaccttgctgtagctgcttaggactcggggggagcgtgggacccagtgtgaacttcctcactggaataggaaatgcttttgtgctgtctctgggcagccctctatgtgaattttttgtcctgcaaggggctagggtctctcctgtgactaaaattccaggggttcacagtaggaatgtggaccattgggcatctctaacttaacctttccctgtgtggagtctctcctagcttcttgccaatcccggctgggcaggctgtcttgtttcgtctccttccttgcttttctgttgaataccagtgttcctcttggataatctactcaaagtgtgattatatactcatggttttagtttttagtggggaagtggatatgagagacctctggtcagttatcttgactatattgtaaagtctgtattttttgttgtgtgtagtctctgaaatctctgatcctttagcttatagtaagattttagcttgtaagatttttttagcttttaagattttttagcttgtaagatattttttagctagtaagattttagcttgtaagatttttagcttgggccgggcacggtggcttacacctgtaatcccagcactttgggaggctgaggcaggcagatcacaagatcaggagatcgagatcatcctggctaatatggtgaaacctcatctctgctaaaaatacaaaaaattagccaggtgtggtggtgggcacctgtagtcccagctacttgggaggctgaggtgggagaatggcatgaacccaggaggcggagcttgcagtgagccgagattgcgccactgcactccagcctgggcgacagagcgagactccatctcaaaaaaaaatttttttttggcttgtaagattcatttttagcatgtaagattttgctttagcttgtaagatttttttttgacagattttattgaattcctagggccaaaagaaaataatagaaaagaacaaaaaactctttcagtctttgcagattggctctgtgttggggctctcattcagtgtttacccagtccatttacaactctgccttagccttcccttcctgcttgtgctgactctaaagaacagcttgaggtgaaagcttagggtcttttcttctaagttctgttccttgggcatgcatatggcttttctactctccaatacatagaaatgcttttcagtgctgtcatttcccaaataaactctcctctgtcatctctgttttggttttcagtgtgtttattgtttgcctcaactttagacctctgccccagatagcaacagcttgttcatttgcaatgttttcaatgaatatcttctgtgaagctgcttttctgccctgagaaagtcctgaattaagtggaacataggtgtgctctttgcatcatttcttcagtcagtccccagtcagggcaaaagagagaaaaacagttttttgagattaaggttggctctgttcactccagagccagggaccagagtttcacactgggagcaccaattgccatcttcaagactttgcttaactagggggagtggagccggggctggtgggcaggacatgggcgtagtgggtggttaagggaaagtaaaaatgctgcacaactttcctgccatttttaagtggctgttttcttgattcagcatttatctgattgctgcatatctttgcctattttctgtagtttatatgaagttcattctgacagtttttactcattttttttttcctgtttctgggagaaggataggtccttggaactacctactccaccattttcactgatgttactcttttacttttctaatcatggaagtaaagtttaagatttttctatctatattggtgagattacccttggtatcgtagtcaaactaaattcacaaaatgtgtcaatttctctgttcgctcttggtctattctctgtgatagtatacttaagatggaattgtctttcatgtttggttgaactcaaatataaatcttgtctgggcctgatggtggttttttctttcttcattgttattttgttattcttcttccttcccttcttctgtctctttcttgctccttctttcttttcttcttcttttgtttaagtggatagagtttgtttcctttttttttttttgagactgagtcttgctctgttgcccaggctggagtgcagcagcatgattatggcacactgccacctccgccttccaagttcaagtgattcatttccctcagcctcctgactagctggactacaggcacccaccaccacacccagctaatttttgtatttttggtagagacggggtttgccatgttggccaagcttatctcaaactcctgacttcaggtgatccacctgcctcggcctctcaaagtgtgtgagccactgcacccagccagaatctatttctttaatggttatagttctgttgaagttttaaattaatgaatctttttaaagttacattttcacaaaaattgtccatctgtctatattttcaagtttattggcataatgttgttctagcactctttgtcttcataacttataattatgctttttaaaagttcttagtgtttatctgtgcctctttttttcttattatccttgacaaagatctattttgcaaagaatcatcttttattttgttacttctccctattggatttttatcatgtccatctctaacctttctttgggattactctattgtcttctactatattgagttagatacttagatcatttgctcttattttctaatataagcagataaagctacaatttttcctcttgagtttcaccttagttgtattccacaatttttagtacatgatattggtaatcattattcattataaatgcctcccaatgtatttttcctttgacttctgagttatttggaagttatttgtaaataaaagaatgaatgcaagtatactgtttaaaagttgctgctaaataatgttattataaataacttaccgaaattattacacatctgtaagtagacggtcgtgttaataatttaaattaagaatttaagtctttcttgtcagtttgtcatttgtgccgtttctatctacagtggaaaatagtgaaaacataactagaataaaatacttttgtgttctgtgagccttatgttttaaatatataggattaaaaaaattttacatattcatttctgatttaattgaagtgtggttagagaacatggtatgaatggttattctgtggaacttctaaagacttgttttgagttcacgtgattgttgtgtttgtgcttgtgtgtgtacgtgtatgcgtatgtgtgaatgttctatatatgcttgaaaatagcttgtattatttacttgtgtggtttaggtattctcttggttttttagttcagtggctttcaaccatttgttgatgtaccttctaaaatatcttttaagaaattacatatgcactcacattttaagttgatatttaaaatttttcattgtaaattaaaatagcccaaaggacataattattaatgtattgtgtaaaacttgacacattgttcttttaagagtattcatgacttctaaatatttttgtgatttgatacctattaattaaaacaactccttctgtgcaaccacatgcaagcatggatttttattatacctccagttcagggaaacttgaaaatttgaaccaacctttctatagaggacaactgaagaaaccagatgaaatgttttaaaaatatctgcttgaaagagtctcagcagttatattttaaaatactgacacacctcggagatattgtgggtttggttccagactatcgcagtgaagcaaatattgcaataaagcaaatcacatgaagttttaggtttcccagtgcatataaaagttatgtttaaattattctgtagtctgttaagtatgcaataatattatgtccaaaaaagtacataccttaatttaaaaatactttattgtcaaaaagcactcataatcatctgagccttcagtgagtcataatctttttgttagtggagagtcttgccttgatgttgatggctactgactgaccagggtggtggctgctgaaggttgggtggctatggcaatatcttaaaataagacaatgaaggttgctgcatcagtggactcttcctttcgtgaaagatgtctctgtagtatgcaatgctatttgatagcattttacccgcagtagaacttctttgaaaataggaagttgattcactcaaaccctgccactgctttgattaagttgatgtagtattataaatcctttgttgtcatttcaacaatattcacagcatcttcaccaggaatagattccatctcaagaaaccactttctttgctcatccataaaaagcaattccttatatgtccaagttttatcgtgagattacagcaattcagtcacgtcttcaagctccacttctaattttagttctcttgttacttctaccacatctgcagtgacttccttcactgaagattaaatccctcaaagatacccatgagagccagaatcagcttcttccaaactcctgttaatgttgacattttgacctcctctcatgaactacaaatgtttttcatgacgtctagaatggtgaactctttccataagtttttttatttactttgcttagatctgtgagaggaaacactgtgacagccataaccttactaaatgtgtttcccaaataataagatttgaaagtcaaattgctccttatccatgggctgcagaatggatgttgtgttagcaggcatgaaaacaacatgaaattcaatgtacatcttcatcagagctcttgggtgaccaggtgcattgtcaatgagtaataatacttggacaggaatctttttttctgagctttaggtctcaacggtggcttaaaatattcagtaaaccacgctatatacagatgtgctatcttctaggctttgttgtcccatttatagagcacaggcagggtaattgagcatagttcttaatggccatagattttcagaatggtcaataagcattggcttcaactaaaagtcacttgttgcattagctcctcagaagagagtcattcagttctttgaaactttgaaggcaagcactgacttctttctagctatgaaactactcctagatggtatcttcttccaatagaaggctgttttgtctacactgaaaatctattgtttatcagtgatctttgttagatctttggataacttgctgcatcctctccatcaacacttgctgcttcaccttgcacttttatgttagggacatggtttcttttcttaaacctcatgaaccagcctctactagcttcttgcttttcttctgcagcttcctcacctctctcagccttcacaggtttgaagacaattagggccttgctctggtttagggtttggcttgagggaatattgtggctggtttgatcttctatctagaccactcaaacttttgtcacatcatcaataaggctgttttgctctcttatcatttatgtatttactgcagtcgcatttttaatttcattcaaaaactttttctttgcattcagaacttgattgactggtgcaggaggcctggcttttagcctctcttggcttttaataataccttcctcacttagtttaattatttctagcttttgatttaaagtgagagatatgaaactctttaatatatgaaactcttcctttcccttgaatgcctagaggccattgtaggattattaattggcctaatttccatattgttgtgtctcagggaatagagaggcctaaggagagggagagacacaggaatggctgttgctggagcggtcagaacacacacagcatttgttgcttatgtttgtcatcttatatgggcacggttcatagcggccccaaatgattacaattgtaatgtcaaagatcactgatcacagatcatcataactgatataataataaaaaagtttgaagtattgcaagaattaccaaaatgtgacatagggacacaaagtgagcacgtgctgttggaaaaatggtgctgacagacttactagattcacacttgctctaaatccttattttgtaaagaaaaaaaccccacaatatctgcaaagtacaataatgcagggtgcactaaaatgaagtatgtttgtataaaaaaagattgtgattaataattcagttgtaggggttggtatatcaaaagatttcgactgctattacattttgttccgattttaagagttgttactttagcttcatttcaaattataggtgctatgtaaaaatattctgttgtgtacctttaataattcctttctctgcttcttttctaggtatcacacctgtgtatcataatatgtttgctttaatgagtgaaacagaaaggatctggtatccacccaaccatgtcttccatatagatgagtcaaccaggcataatgtactctacagaataaggtactttcttcagtaaagtaactcacttaatgctaaaaggcaaaatgggagaaattatcaaatattttttaattgcaaggtacttaataccagatacctgaaccaattagttagcactcatttaagatttcatttaagattctattctgtttctccatcagagaaactgtttatacatgttgtgtaagtagaatactctgagaataaagctgttttggtgggatgccacttaactccttatgattataattaaataagtaaacaaaatcacagtggcctttattaacaaaatcctaaatgtttgggatattgctggtttgtgcagcgttttgtgcaatagaatgcaatttcacatcttatctttataaagaactttttaaaaagttgacgtgaagaaaagagacttttcccagtgtgtatttgcagcctcaaattgtaagttaatttatataatttatggtaatgtgtaatgcctatttagagaaatctagaagtatttttttgctcgaaaggatgaaacaaagatacgtttgatttgtgtctcacaaatacctgtgatttttctaagcatttatatacatatatatataattcatcataacttcatgaggtgttaagatttccacattaaagataaagaatttggagcactgagaagtaatattactcaaatttattcatggtcacacaggtaggaattgggagtcaggttcaaatccaagcctggtttgcttcataagcttgcctcttaatcacctcatgtgtacttcattaaagagataatgtatatataatatttattattgtgcctatcacttggtgctctctcaataaattttagtattgttttgcttctttctcttcccctattctatataaaaatatgcagttggatgtgtttgcatttactgatgtctaatgtataatttgcactgagttcaaaaaaatattttttatataattattgaaaagacaattggtgaaaaaaataaatgttcaaagaaataatagatgtacaaaaatcaacagcattcttatatgcaagcaaccagttatataatagataaagaagatcctatgcagtgtagctacaaaaacccttaactaaccaggaatggtcttaataagaaaaaacagaagacagtataggaaaattagaaagttatttgaagaatatgaagaattaggacataacattggaatggggagatggaatattacaaagatcaatttctcttatgctatatccttagctctaagccaatcaaaatcctaacaaaggcattttacggaatttgacacattactatgtaaattgagaattattaaataagatagccatgagaaagaagacttacctggcaattgtaaaatattttgtcccaggagatattttcacattatatgaaactacaaaatggtatctattattaaagccacataattaaattcagaatcataaactaaataatgagaatgatggggccagtatatcttgaaagtactccttcatacatatagaaacataataatatgaagaaatcttttcatattaacgtggaagggagagattagtcaacaaatggtggtagaatagttgattagctgtttgaataaaattttagcttcttactttataatgtatatcagataaattatagattgattaaagatcagattgatatgtaaatagaaatgtaaagaaaatcaaactataaaagtctgaattggaactgaattcaagtccttgggaaaataccatttaagttgcaaaacaatagaaaaaatcatatgggaatgactgcaattgtcaactataaaaattttcaaatgtctgaaggtttcctcttaaaatgaaaaggcaggagggtggagccaagatgactgaataggaacaggtccagtctacagctcccagcatgggcgatgcagaagacgggtgatttctgcatttccaactgaggtgtaccgggttcgtctcactggggagtgtaggaaagtgagtgtaggacagtgggtgcagcacactgagcatgagccgaagcagggcgaggcatcgccacacccgggaagcgcaaagggtcagggaattccctttcctagtcaaagaaaggggtgacagacggcacctggaaaatcgggtcactcccactctaatactgcgctattctaacggtattagcaaatggcacatatcccgcgcctggctcagagggtcctacgcccacggagcctcgctcattgctagcacagcagtctgagatcaaactgcaaggtggcagcgaggctgggggaggggcgcccgccattgccgagggttgagtaggtaaacaaagcagccaggaagctcaaactgggtggagcccaccacagctcaaggaggcctgccggcctctgtagactccacctctgggggcagggcatagccaaacaaaaggcagcagaatcctttgcagacttaaatgtccctgtctgacagctttgaagagtagtggttctcccagaatgcagctggagatctgagaacggacagactgcctcatcaagtgggtccctgaaccccgagtagcctaactgggaggcacccccaagtagggggagactgacacctcacatggccgggtactcctctgagacaaaacttccagaggaacagtcaggcagcaacatttgctgctcaccaatatccgctgttctgcagccactgctgctggtacccaggcaaacagggtctggagtggacctccagcaaactccaacagacctgcagcagagggtcctgactgtcagaaggaaaactaacaaacagaaatgacatccacaccaaaaccccatctgtatgtcaccatcatcaaagacaaaaggtagataaaaccacaaagatggggaaaaaacagagcagaaaaactggaaactctaaaaatgagagcacctctcctcctccaaaggaacgcagctccttaccagcaacggaacaaagccggatggagaatgactttgacaagttgagagaagaaggcttcagacgatcaaactactccaagctaaaggaggaagtttgaactcatggcaaagaagttaaaaaccttgaaaaaaaattagacaaatggctaactagaataaccaatgcagagaagtccttaaaggacctgatggagctgaaaaccaaggcacgagaactacgtgatgaatgcacaagcctcagtagccgattcaatcaataggaagaaagggtatcagagatggaagatgaaatgaatgaaatgaagtgagaagagaagtttagagaaaaaggaataaaaggaaacaaacaaagccttcaagaaatatgggactatgtgaaaagaccaaatctacgtctcattggtgtacctgatggggagaatggaaccaagttggaaaacactctgcaggatattatccaggagaacttccctaatctagcgaggcaggcaaacattcaaattcaggaaatagagagaacgccacaaagatactccttgagaagagcaactccaacacacataattgtcagattcaccaaagttgaaatgaaggaaaaaatgttaagggcagccagagagaaaggttgggtaacccacaaagggaagcccatcagactaacagcagatctcttggcagaaactctacaagccagaagagagtgggggccaatattcaacattcttaaagaaaagaattttcaacccagaatgtcatatccagccaaactaagcttcatatgtgaaggagaaataaaatcctttacagacaagcaaatgctgagagattttgtcaccaccaggcctgccctaaaagagctcctgaaggaagcactaaacatagaaaggaacaactggtaccagccactgcaaaaacacgccaaattgtaaagaccatcgaggctaggaagaaactgcatcaactaatgagcaaaataaccaggtaacgtcataaagaccggatcaaattcacccataacaatattaaccttaaacgtaaatgggctaaatgctccaattaaaagacacagactggtaaactggataaagagtcaagacccatcagtgtgctgtattcaggaaacccatctcacgtgcagagacacacataggctcaaaataaagggatggaggaacatctaccaagcaaacggaaaacaaaaaaaggcagggattgcaatcctagtctcggataaaacagactttaaaccaacaaagatcaaaagaaacaaagaaggccattacataatggtaaagggatcaactcaacaaaaagagctaactgtcctaaatatatatgcacccaatacaggagcacccagattcataaagcaagtccttagagacctacaaagagacttagacttccacacaataataatgggagactttaacaccccactgtcaacattagacagatcaacaagacagaaagttaacaaggatatccaggaattgaattcagctctggaccaagcagacctaatagacatctacagaactctccaccccaaatcaacagaatatatattttcagcaccacaccacacctattccaaaattgaccacatagttggaagtaaagcactcctcagcaagtgtaaaagaacagaaattataacaaactgtctctcagaccacagtgcaatcaaactagaactcaggattaagaaactcactcaaaaccactcaactacatggaaactgaacaacctgctcctgaatgactactgggtacataacgaaatgacggcagaaataaagatgttctttgaaaccaacgagaacaaagacacaacataccagaatctctgggacacattcaaagcagtgtgtagagggaaatttatagcactaaaggcccacaagagaaagcaggaaagatccaattgacaccctaacatcacaattaaaagaactagaaaaccaagagcaaacacattcaaaagctagcagaaggcaagaaataactgagatcagagcagaactgaaggacatagagagacaaaaaacccttcaaaaaaatcaatgaatgctggagctggtgttttgaaaagatcaacaaaattgatagactgctagcaagaataataagaaaagagagaagaatcaaatacatgcaataaaaaatgataaaggggatatcaacccgatcccacagaaatacaaactaccatcagagaatactataaacacctctacatgaataaactagaaaatctagaataaatggataaattcctggacacatacaccctcccaagactaaaccagaaagaagttgaatctctgcatagaccaataacaggctctgaaattgaggcaataattaatagtttaccaaccaaaaaaagtccaggaccagatggattcacagctgaattctaccagaggtgcaaagaggagctggtaccattccttctgaaactattccaatcaatagaataagagggaatcctccctaactcattttatgaggccagcatcatcctgataccaaagcctggcagagacacaaccaaaaaggagaattttataccaatatccttgatgaacattgatgcaaaaatcctcaacaaaatactggcaaaccgaatccagcagcacatcaaaaagcttatccaccatgatcaagtgggcttcatgcctgggatgcaaggctggttcaacatatgcaaatcaataaacgtaatccagcatataaacagaactaacggcaaaaaccatatgattatctcagaggcagaaaaggtctttggcaaaattcaacaacccttcatgctaaaaactctcaataaattaggtattgatgggacgtgtctcaaaataataagagctatctatgacataccgacagccaatatcatactgaatggacagaaactggaagcattccctttgaaaactggcacaagacagggatgccctctctcaccactcctattcaacatagtgttggaagttctggccagggcagtcaggctggagaaggaaataaaggttatttgattaggaaaagaggaagtcaaattgtccctgtttgcagatgacatgattgtatatctggaaaaccccatcgtctcagcccaaaatctccttaagctgataagcaacttcagcaaagtctcagcatacaaaatcaatgtgcaaaaatcacaagcgttcttacccaccaataacagacaaacagagagccaaatcatgagtgaactcccattcacaattgcttcaaagagaatacctaggaatccaacttacaagggatgtgaaggacctcttcaaggagaactacaaaccactgctcaatgaagtaaaagaggatacaaacaaatggaagaacattccatgctcatgggtaggaagaatcaatattgtgaaaatggccatactgcccaaagtcctttatggattcaatgccatccccatcaagctacagatgactttcttcacagaattggaaaaaactactttaaagttcatatggaaccaaaaaagagcccacattgccaagtcaatcctaagccaaaagaacaaagctggaggcatcacgctacctgacttcaaactatactacaaggctacagtaaccaaaacagcatggtactggtatcaaaacagagatatagaccaatggaaagaaataatgctacctatctacaaccatctgatctttgacaaacctgacaaaaacaagaaatggggaaaggattccctatttaataaatggtgctgggaaaactggctagccatgtgtagaaagctgaaactggatcccttccttacaccttatacaaaaattaattcaagatggattaaagacttaaatgttagacctaaaaccataaaaaccctagaagaaaacctaggcaataccattcaggacataagcatgggcaaggacttcatgtctaaaacaccaaaagcaatggcaacaaaagccagaattgacaaatgggatctcattaaaccaaagagcttctgcacagcaaaagaaactaccatcagagtgaacaggcaacctacagaatgggagaacatttttgtaatctactcatctgataaagggctaatatccagaatatacaatgaactctaacaaatttacaagaaaacaacaaccccatcaaaaagtgggcgaaggatacgaacagacacttcttgaaagaagacatttatgcagccaaaagacatgaaaaaatgctcatcaccactggccatcagagaaatgcaaatcaaaaccacaaagagataccatctcacaccagttagaatggcgatcattaaaaagtcaggaaacaacaggtgctggagaggatgtggagaaataggaacatttttacactgttggtgggactgtaaactagttcaaccattgtggaagtcagtgtggcgattcctcagggatctagaactagaaataccatttgacccagccatcccattactgggtatatacccaaaggattataaatcatgctgctataaagacacatgcacacgtatgtttattgcggcactattcacaataacaaagacttggaaccaagctagatgtccaacaatgatagactggattaagaaaatgtggcacatatacaccatggaatactgtgcagccatgaaaaatgatgagttcatgtcctttgtagggacatggatgaagctggaaaccatcattctcagcaaactatcgcaaggacaaaaaaccaaacactgcatgttctcactcttaggtgggaattgaacaatgagaacacatggacacaggaatggaacatcacataccggggcctgttctggggtggggggatggaggagggatagcattaggaaatatacctaatgttaaatgacgagttactgggtgcagcacaccaacatggcacatgtatacatatgtaactaacctgcatgttgtgcacatgtaccctaaaacttaaagtataatagaaaaaaatgaaaaggcaaattgtaaagatagtttcaacaaatcaaataaacataaggttagtattcttgtaagtatgaaatttaaaacagtgtatccatttaacaattacttaatgtacatgaatatatagcgtcactagttatgagaataatgaacgagattgcttgctttagcacatagttacaactattcattattcttataactagtgatgctgagaattttttgaaaaggccattaatgatttgttcttcttttgttaaatatttcttcatgtacattaaataattgtttaatggatacagtgtttttaatgccaacaaattagaggatcaagatgaaatggacaaattcctagaaagacacaagttataggaactgctaaaagaaagaacagaaagtttgaataggtctatgacaaataaagaaatcaaattagcaatttttataaaagcccaggcccaagtggcttcacttgtgaattctatcacacattaaaaaaattattactagttattcacaaaaaatagaaaaggaaggaggatttctgagctctttctgtgagttcagtattaccctgataacaaattcagacaaagatgtctagaagaaaagaaaactacagaccaatgttgtaggtagaaaatcaacaaaatacttgcaaaccgaatccagcaatacagcttgaatatgtcttatctgaaatgcttgggaccagaagtgttttggattttagatttttttttttttttttggattttagaatatttgcagagtatacgctggttgaacatacctaatataaaaatctaaagtctgaaatgctctgatgaatatttcttttgcacatcaggttagcgctctaaaggttttgaattttggagcatttcggatttcagattttcaggttaggaatgctcagtttgtttataaaaagatgaaatactatgaccaggtgggatttatcccaggaaatacaaggctagtgtaacttccaaaaatcaatcaatgtaatacaccacattaatagaataaatgaccaaaaccacatgatcatcccaagagacacagaaaaagtatttgataaaatccagcatcccatcattataaaaaaactcaacacaataggaatggcaaggaacttcctcaatttgttaaagggcatctgtaaaaaattcaaaagtaatgtcatacttattagtgaaagactgaatgccttttccctatgatcaggaatgagatgaggatagctacttttaccactttgatttaacactatactgtagattcagggtagggaaattaggcaagaaaaagaaataaaaggcatttatattggaaaataagaagtaaaattgtagtcatcccgctgtatccatgggtttcacatccatggattaaaccaactgcagattgaaaatacttggaaaaaaagttgtgcttacactgaacatgtacagactttttcttgtcattactccctaaagaatacggtataacaactatttacataacatttacattgtattaggtattataaatagtctagagattttaaagtatactgaaggatgtgcacaggttatatgcaaatactatgcctttgtatatcaggaacatgagtatttgcagattttggtatgtgtgggaggttctggaactagtactgcatagataccaaaggatgattgtgtattcacagattacatgatcttgcatattaaaaatcctaaggaattaataaaaaaactattagaactaataaatgagctcaggtcagttgcagaatagaagatcaatatataaaaatcagttgtatttctatacagagacaaagaacaatccaaaaatgaaattaaaaaaatttcattaacaatagcataacaaatttttaggaataaacttaaagaagtgtaaaatgtatacactgagaaatataaaacatcattgaaagaaattaaggaaacacctaaataaatggaaagatatctcatagaggacttcatatttttaagatggcaatactccttaattgatctgtatgttcaatgcaattcctactgaattcctaaatgtctttattgcagaaattgacaggttaatcataaatttatataaaaagcaaagggacttagcatagctaaaacaatcttgaaacaatacaaagtttgaagacttatacttcctaattacaaaatttattacaaaaggactgtaatcaagacaatgtgatactaaaggatgaatatacagattaatggaaaggaattgacagtctcaatataatttctcacattgatggtgattgatttttgatcagggtgccaagacaattcatgggcatagaatagtcttttaaactaacagtgcggggacaactggatatccacatgtaaactaatgaagtaagacaatctacttcacactatatacaaaaaaaaaaagcttaaagtggatcataggcctatatatgagagctaaacttattaaaactccaagaagaaacacagaagtctttgtgtacttagattaggcagtggtttcttagatatgacaccaaaagctcaagtgacaaaagaaaaatagttaagttaggctttatcaaagttaaaaacatctgtgtgtcaaagcacactatcaaaaatgcgaaaagaccacccacaaatgggttccacaaaatggaagcaaatgtttgggaatcatatatctgataattgtcttatctccagaatataaaagaattcttacagctcaacaagacaatgacaacttaatttaaaaagtaggcaagggacttggatagacatttttccaaataagatatacaaatggccaaaaagcatgtaaaaagatgcccaacaggtgggcccctgagcgggcgtccgggaccgtggtgtgccaggcgccttccgcccttaacatgcggtggctggcccaggcggtgcaggagctggagcggggcccgagtggggcgccagagccccagcgcgagcaggagaggggccggagcgcggatccgcgccgcgctgctgaagcctggccggccacccagacgctgccggcagcctggccatggcggagccaaggaaagaatctctatacaaacaaatatgtggctatcaaattggagctgatcaagttccggaccccgcagctgcacctgggtaccggttctacaagcagctcagcgccatagagggcgtccctcaggtctactacctactacagcctggaggacctgttcgaccttcacgcccaagacggtgctcctgatcgccatccggctgatcacgcgcatggattatgtgcacaccaagaacctcatttaccaggacgtgaagcccgagaacttcctggtggggcgcccggggaccaagcggcagcacgccatccacatcatcgacctcgggctggccaaggggtacactggtctcaggaccaagaagcacatcccgtgcagccagcacaagagcttgacaggtacggcgtgctacatgagcatcaacatgcacctgggcaaggagcagagccactgcaacaacctggaggtgctgggccacatgttcatgtacttcctgtgcagcagcctcccctggcaggggctcaaggctgacacgatcatgagcggtacagaagatcggggacacatagcgcgccacgcccatcgaagtgctctgcgagaacttcccagaggagatggctacgtacctgcactacgtgcggcgcctggactttgagaagcccgactgtgactacatgcggcgcctggactttgagaagctcgactacgactacctgcggaagctctccagctacctcttcgaccgaagcggcttcgtgttcgactctgagtacgaggggctcgggaagcccttggcgacccccatcagcagtgtccacaccgacctgccctcccagcctcagcttcgggacaaagatcagccgcacagcaaaaaccaggcgctgaactccaccaatggggagctgaacgcggacgaccccatggccggccactccagcgcccatcagggcgcctgcagagatggaggtgggcgatgaaacgaaatgctgctgtttcttccccctgaatcttctccgtgcggccccttggggagcgagcttgtgtgagggccttggggcccacccacagcggcccagggccagacgctggctggaagccaggacacagactgcagggtcttggccggcggccccatccccgggacgaggggtcacttccttcacgtaagactggccaaaatttcttttttttttttttttttttttttgagacggagtctcgctttgtcgcccaggccggactgcggactgcagtggcgcaatctcggctcactgcaagctccgcctcccgggttcccgccattctcctgcctcagcctcccaagtagctgggactacaggcgcccgccaccgcgcccggctaattttttgtatttttagtagagacggggtttcaccttgttagccaggatggtctcgatctcctgacctcatgatccacccgcctcggcctcccaaagtgctgggattacaggcgtgagccaccgcgcccggccaagactggccaaaatttctacacctgtgtctagtcctcccctccaagagcattaactatttaaaacaaggaataaaggaaaaaaaagaaaggccccctccacccccacccctccattactttgctgaagtgagtagtgggatcctggaggcccccagggctgaggcccagccagctgcccccgttagcgtcataaagtccagcttgtctccctcatccaaaggccgttttctcagtgggagggcaggcctggcctggaggggtgctgtggggccatcttgcccaggcccacctgggagggacacaggcattgctgccaggggtgaggctgtgccccaggcctccccaaaactaaaggggaacggaggggtggggccgcggctgaagccagccccgcaaccaaaatgctgcaccaaagctcggtcgccacaggcacggccaccgcagcctttcacagcctggccccggcgaggggcaggtgggccctgctaggagggtgcttctcgaggcacctgttccccgaggctgtgctccgaccctcagaagctgaggggggtgggccggctggcgtcgcgcggctcggcccctgggccctgctgtgtggaggcgcgcgggctcgtggcttcctgtctctgtgctccgccccctggcaagcagccgcagacaaaatgccttaaagcccccgacccagccccgcaggtgtatgtgcaggggggtctgcgggcggccctggactggctggcggactcccagcgggtcagcttgaggcagtgcccagggcggtggccgtgagtctggtttttgctttaccaagtgtacggaaatggcgtttacgtttctctgatgctcttttgaagccatacaacttaggggctttaaaaaaaaaaaggaaaaatgaaaccctccgaaaaaaagatgcccaacatcattggtcattagagaaatacaaatcaaaaccacgatgggataataataggtctacaaggatggcaaaaatcagaaagacaaacaataacaagtgttagagaatttggactaatttggatgcagtatattgctgttgggaatgtaaagtggtgctgctactttggaaaacagtttggccattccttaaaagggtaaacaaagagttaccatatgactcagcaattctacttctagatatatatgcaatagaaatgaaaacatatccacaaaaacttgtacatgactcttcatactagcgttattcacaatagaaaaataatagaaacaaacccaaatgtctgtcaggcgatgaatggatacagaaaaagtggtatattcatacaatgaaatattaatttggcaataaaaggaaatgaagtaatgatacatgctctaatgtggatgaaccttgaaaacattatgctgagtgaaagaaggcagacagaaaggccacatgttctaaaattagattgtgatatttgtacaatgctatgaataaactaaaaacattgaattttacactttaagtgggtggactttatggtatgtgaattatatctcaataaaggtgttactaaaagacaatatagagtgttctttgtttctctgaaggacaagtttttaacttccatttctccaaataagcaattatttgtttttataccaaattagcattttcagattccctactgatgttactggattaagctatgtttttaactttttgttaatttctacattttttgtttcctactattgcttctacattttgtgcactgaaggaggtagtatattgattttacacttacatttcttgtactttctgcctatattagtgttatccacatatccttttgtctcacatttatatttaatactgttagctgtgttttctaagtatgggataatacctttcagtatgctgtaggtgactatatatagatagtacgtttgtatttgaactatttggaagctgaccaaatgtttttattatcttgtagattttactttcctcgttggtattgcagtggcagcaacagagcctatcggcatggaatatctcgaggtgctgaagctcctcttcttgatgactttgtcatgtcttacctctttgctcaggtatgattatattatcttacttgtacatgagttaaatgataaatatcttgctgtttaataagtcacttaatcaggaaaaactttacatatgggaaaattgcagttctgtcttgcacagcaggtgcagagaagtaacaaaattgagtcttttagcactagtttttaatcccatggtttatggataatagaatctattttataaagtttttttggactgatccttttgaatttctttcttttttaggactttagatcattttaaggatttcgcaaagtatagactgaggtttacaacatgattcatgtagacatacgtggctaaaatattagtaacatttctttatggtttttaaaaaaatttttggacaatttcaggcttacacaatggacaatgaactgtagagaaagtaggttacataaaaaaatgagctctgatagtttgtttagctgtttataggaaggtgactggatgttgatacttagtctaagagctatattcaagttatttgttcactaatacagttatgtcaaatttttgtattgtgttggtatttcataatgctttcttctctattaccttgatttaaacagtaattgaaatattttgtcattaaataacttgtttttatgtgctgctagactagtaggaatagaaattaaaggaagaaaatatattagtgctcttgggtaaaaataggcacttggtatccccaaggtatcaggagttctaaatcagatttgctaatattgtaggaaacaagcccacagatcctcatggctcgcatttctgagaggaagcctagtaagcctagttcagtttatgaacaacaaaaggaaaaacatttctctattggggtatgagaccaacaaactttatttttattgtggtaagagatatataataaaaatgaccattttaaccattttaagtgtacagttcagttgtattaagtacaaatacattgctgtacaaccatcaccaccatccatctccagaacatttttcatcttcccaaatggaaacttcatacccattaaataataactctgtatttcccactcccaatggccttttgcaatcaccattctactttctgaatataaatctgccttttctatgtacctcatacaaatggagttatatagcatttgtccttttttgactggcttatttcacttagcataatgtctgtcaggttcatccatgttgtagcatgtgccagaatttctttcctttttaaggctgaataatattccattgcatatgtatactgcattttatttgttcattcatctgttgatggatacttgggttgctgctgtgaacatgggtaaacaaatatttccttgagtccctgttttcagttcttttcaatatatacccagaaatggaatcgctggatcatatggtaaatttataattttttttgaggaactgctacattgttttctgtagtggctgcactatttttcagtcctaccagcagtgcacaagtgttccaatttctcaacatcctcaacaatgctttgctttgtttgataatagccatctctatgggtttgaggtggtatcattgtgattttgatgcatacttctctaacaaccagtgatcatgagcatcttttcatatgcttgttggccatctgtttatcttctttgcagagatgttgcttgttggctatttgtttatcttctttgcagagatgtctactgaagtcctttgcccatttttaaatcaggttgtttgtttgttgttatattatagaaattattattctggatcttaactccttataagatacatgatttgtagatagtttttcccattctctaggttgccttttcattctgttgcttgtcttttgatggacaaaagttttaaatttggctgtattctaatttatctattttttgtttcctatgtttttggtgtcatatccaagaaatcattgccaaatccaatgttatgaacctttctttctgttttcttgtaagagttttatcattttagctcttacatttaggcattgggtccattttgagttaatttttgtctatcgtgaaggtaagggcccaacttcttttgcttgtgaatatccagttttcctagcaccatttgttgaaagactgtcttttctccattgaatggtcttggcacctttgttgaaaatcatttgaccaccaacctacttttttatacagctcctttatctgtatagccattatgaaaagagaggggaatggagagaggcttctaagaatagccttttgaaaacaggatattatgaggttacaactttctgttgcttttacgggtatattatttcacctgtgctgcagagctagtatattttgggggtaggctagttaagtcccatttataagccaagttttcccaaactattcattcagctactttagcctaatattaatactgcaatgtctagtatttttgatctagaaaaattttgggtgatttcagaatactcaattttatccttctaggaaggattgtcttatctagcatggcaaggtaattccaccatataattctaaattatgtctagatagtaccacaagcaattttctattttttaatgtttttacttctctaaatttgtgcccagaaaatatgatagtatttagattactctaagattgtactgttatcattttatattatatgcatgttgtagactatatatagcaaatgtgaccagtggcattaccagagtgtaagaatatcttgacatctttaaataaccaaaaaatagataagccactgaactgtctttaaagttcttaagacagtacctgtaggaagacagatttggaaaaggtaagcaaataaaaatcaaaagtaagatggcccttttaaattcagtttcctctgggaattaattgcctttatatcatcaaatatggctgctaagcaaataaactgctgacatgtgaacaacttttaattaattcatatctattcaacaacaattggatgtttacctcatgttcttggcatcatttctgattttgtgactgtgactgttttttatttccctggctaatgaagatgtaaatttcttaagttcaaattttgtcagctactcaaatgagaaaaggttttctttcttattttatttttttatagagattgaactcctgggctccagtgattgtcttgcttcagcctgtcagcctcctgagtagctaggtacaggtgtgtgccactatgcctggctaatttttttagttttggttttgtggagatggggtctcgctctattgtccaggctggtttcaaacacctggcttcaaatgatcctcctacctcagcctcccaaagtgctgggagtacgagtgtgagccaccacacctggcctgaaatttttcagtagttctaattaaatgaaatttctgagggtacatactataatatttaaggaatagtatttattatgttttggcatttgagactcttccatttgtaacttttctctagtgaatagtttattatgtttttagtattgccatcactcatttttcatatatttattgtcttctgatcatgacttccatagaatttccacatgagcagaatttgttatctaccagttcttttcttttctttctttttttttgagatggagtctcccactgttgcctgggctggagtgcaatggcgtgatctcggctcactgcaacctctgcctcccaggttcaagtgattctcctgactcagcctccctagtagctgggattacaggtgcctgccactacgcccggctaattttttgtatttttagtagagatggggtttcactatgttggccaggctggtctcgaactcctgaccttgtcatctgcctgccttggccttctaaagtgctgggattacaggtgtgagccactgcacccagcccatctactagttctatagggaaccaaggcaggctattaaaaagaatctaccaagtcattgatcatcttctacttaaacagtataacttacttgcctgttctcaaaagtgtggtgaaataagtgtttaaaattgagcaaaaatctgtctcctaccctgaattaattttgtattagcaacgtttaggcctttgttttgggtgatactgattatttgatggtgtggttcttaatagtttattttcttatatgaaaatatcttctatattttattaatagaaaagcaaatatacttttaaatatgtttcttttaataaaattagtttaaaaaggttccagtaaagctttaatttcatgagacaagttattacatcaagagaagagaaatacagatgtagagtatagagggcccttgtccggtttaaaaccttgattcgcattgttattttaggtaatatggctcttacctttttttctacaaagaaaattggtattatgtttagaatatttgtacttctgctttctttttctttctcccattacatgttcagtcagatttatctgtattcctaaatcctccaggtcaaaatcgtagaacctctgtgtttctctcttcttcattctttagacaatatatagttaataaagttatcagccttttttcagaatcttttagtatcttctgtttcctggatcagatccttattatttcgtatctgagccatacaccagcctcttaaagagcctccgtaaatacactttattttcttcaagcacttctatcattgctactactctgccaatggaagagacatgatgaaaacagatctccatagtttctaggatcaggtcattcaagggtacctgcagtcggaccccaacttacttttctaagttttaatccacattatttcttcacataaacttcaggccctaatcaaattagtttatgcatctgaacatatctggtgcttttgtgtgtgtgtcattccttctatttctttaccctgttttgtgtccatcatacatttctttatttttaaacacactgtgaagtttcaaatcttccatgaaaccctccttgattactccagctgaatataatcttaactttctccaagttcctgaaggagcttttgtgtggtgcttcctatatcatgtctggtgttataattatttgcttctgtttcgcttctaagctaaattttggtccccttgatgactgagaccacatcttatacagtcatgtgtcacttacttatggggatatattctgagaaatatgtcgttaggcaattttattgttctgtgaatatcatgtattgtacttatacaaacctatatgttatagcctagtatatgcctagtctgtatggtatagcctattattgctctaggctacaaacttatatagcatgttgctgtactgaatattgtaggcacttgtaacacaacggtaagtatttgtgtagttaaacatatctaaacataaaaaagatacagtaaaaatgcagtattacaatcttatggaaccatcgttatatatgtggtctgccattgaccaaaacattgttatggggcacatggctatttctttgtatccaacaccacttgtagtatgatacttccaacataattggagttcagtatatatttaactcagtaatatctactttaatttaggtaatttttatgtagaagatataatttgaagatatatttaatgaaataggttgatgttatatgtactctgtaattgggaacccagtgtaaatcagtttccatttgcaaatgaacttttattaaaattgtatcgcaaaatgaatgaaaattaaaggaggaatttatgccatttatttatttattaatcattttagagactgggtcttggtctgttacccagactagggtgcagtggtgtgatcatagctgaagagatcctcctacctcagccccccaagtagctgggactgcaggtatgtgccaccatgcctggataatttttaaattttttgtggagatgagatcttgccatgttgcccaggctggtctcaaactcctgggctcaagtgatcttcatgccttggcctcccaaagttctgggattacaggcatgagccactgagcctggccaatttgtatcttgtaaatgcatatgttctgaaaattatgattaaaatataatcatagattaaaacatgataatgaaacttacgatgagatatttccttcaaatttttggttttagtggcggcatgattttgtgcacggatggataaaagtacctgtgactcatgaaacacaggaagaatgtcttgggatggcagtgttagatatgatgagaatagccaaagaaaacgatcaaaccccactggccatctataactctatcaggtaattttcttttgcaaatccttacacataagtgtgagtagagattttatataattcgtatatattttctgtgtttacccatgccttttgattttgtaatactagttaagtactccttatctaaaatgcttggaatcagaaatgcttcagattttggatatttccagattttggaatattggcattgaacttaccagttgagcacccctaatccaaaatgctctaatgagcatttcctttgaacatcatgttgacgttcaaaaagttctggattttggaacatttcgtatttcagatatttgcaagagggatagtcaacctataataaaaaatcatatgggtaagttttatatcttgggagtaaaacacactttgtaaggtgaaattatttaaagagttgtactacaggaaatatcataggtattaaatatctattatttgatttcatttattctgagaaggctagggaagttcagaggaacagaagaaacacctggaggcatactttttgatagaagatcctccagttggctatataaatgacctgaataagtatttcccaaatggtggtgtatattttatttgcattagactcacgtgggggagcctgttaaaatcaaagatttctgggtcctaatccaagagatttggattcagtaaatctgagttgaagcccacaaatatgaatttttacagatgctctagggtattcttatacaaatggtccaaactctgcattcttcaaattattcttctgcatattgaacttgacaatcatggctaatataaaactgctttttaaaaaggtatatataagaatggtttaagtttgaaggcaaatatgtattttatatattacatacttcccagattaaaaatttgagtacatcatgagtgtggttaaagcttccttttttgaaattgttctcccaataactggcttcagtcatttctttgccatgtcatcaaaacagttacatacccaatttgcagagtatcaatttctgtatttctctctttggttttaaatattcttgttttactttcagatgtctgttaggtcttaacctaagggtgtaggccatagggtataattttaggaactcagaaatctagaagattccaaagcccaaaggaaaaaaaaaacacattcattcattcaacagctacttattgaatacttgctgtatgccaggctatagtagaacatagttggaggaagagtatcttagatgtcgttacatagaaactgaaggaattcaggggaacacagttgaagaacagaagctttgacccattgaagatgaatgttataaatatgaagccatctctagacttaagctatcgtggaatatttctgctttggaaaccatgctgtcatccaaagtcttggcacaatctttctatgtagattgtagtttcttccagtttgagaatcatgtcatctattgctcttatccctacattatttagtctagtgtcctaaacctaatgactatttagtaactatttatctgattcttttaactcatgctcttagccaggatataaacacagatgcaaaatgctgcatcatttttttttactgctttactttaaaaatagtgtagatattaaacattcatataagattccatgatattttaaaagagtttattgagataatttacaaatcataaatctcacccatttaaaatatacaatttaatattttgtattatattcacagggttgtataaagatgaccagaatctaattttagaacatttgcatcctttctgaaagaaaccccatgcccattagcattcagtcctcatcccactttcccccagcctctggaaaccacttatctttttgtttgcgtggattttcctgtctcaaacatttcatataaatagaatcatgcaaaatgtggtgtggcattttttttgtctggcttctttcacttaatatgatgtttccaaggttcattcatgttgtagaatgtatcagtacttcatttctttttattgctgaatcatttcattatatagatataccacattttgcttatttgttcttcacttgatgaaaatgtgggctgcttccatgttttggctattgtgactaatgtggctatgaacagttgtatatgagtaattttgtggatgtatttttttcattttttcttgtgcatatatttaggagtggaattcctggaacatatggtaactgtttaactttttgaggaactgcttaacttttcaaaagcagctgtgccacattacattcacactagcagtacatgaagagttccaactctttccgcacttgtttctgtctgtattttatccatcctagtgggtggaagtgctgtctcattctagttttgatgttcatttctctaatgactactgatgtttggcatcttttcatgtactttttggccatttgtatgccttctgtagagaagtgtctatttgaattcattgctcattttttaattgggttatttgtcttttaattattgagtttagaaaattctttttatattctggatacaagtctccacatataatcatatttatgatttgccattatttcctcccattctgtgtattgttattttactttcctgaaggtatcatttgtagcacaaaagttttaattttgaagtagtctaatttgccccatttttctttgtgtcttgtgccatgtggaaatgtggttttagcaacatggatgtctttcttggttttagcaagagcagtttctcttgaaataatggaacagaagccaaactggaatgagttgagggataaatggaaggcaagaaaatggaaatggctatgtacatgctttcaaaaagaggccagataggctgtggccagaaggaaatgtgggattaagagattttacattttatacgggacggacattaatttagcaagtcctttgtgcctgtggattctacatctaatatgccacagaatgaggtccagaaaggcttcctggattagatggtacttgagccttgtcgaatgagtaactagataggagatggatgattggaagaaagattagcatatattacggcatggaaaattatttaatggtacttcagaaataaaatgttccttagaagcacagaaataaattaccttctttagaatattgtacatagagatgaatgtacagaaaagtcagaatatttctaaatggaattgttttgatcacaaaggaattattaggagttgaagctggcctaacaaaataatatacagaagtatgtttgcataatgaaaatggcttccaacaaaatgtaacaatttccaaaattcaggtaaatgttggagcacagcatcataggaaatatttgtagcacagttcaatatatgccaaaatattatcttataaaccattaactctggtatgtgaaatagagaaaaggaatttttagagattcttattaactagactgaggattcatttcattaggggaagaagattaacatcttcttttgtaaacattgatgataacttagagtgtgtggatatatttatatcatcaaacaaaatcttaaagttttatactgtatggatgggggttatgtcaacttacgccacttggccactgtgttgtaaggcctacttaatcatggaaaaaggtggtaacttctttttcaatttttagatttatcttccaatttttgttttgttttgtttttctgtatgtgcttttttatccctagctacaagacattcttaccaaaatgtattcgagcaaagatccaagactatcatattttgacaaggaagcgaataaggtacagatttcgcagatttattcagcaattcagccaatgcaaagccactgccagaaacttgaaacttaagtatcttataaatctggaaactctgcagtctgccttctacacagagaaatttgaagtaaaagaacctggaagtggtccttcaggtgaggagatttttgcaaccattataataactggaaacggtggaattcagtggtcaagagggaaacataaagaaagtgagacactgacagaacaggtaatccttaatgatatgttcttgttctttgttattttaagtacaatggaaataaaaacaaagtaattttaatcatttgcaacatggtattgcacttctcccatttgatagaagtggaagtttttaatagcgtgaacctatcaaggtcatataattctttgcctactattcttaaatggttttttcatttaattttttatgacaaaataattaccaatgactatattatagtttcagaaagatgtcaaattctaaaagtgattttaaaggagttttgcctttcactactagtgataacagaaggcataattataaaacttgttaactagaaaagattgatattaattgattttatgataatatatacctgctaaataatgaatttattttaggtttgcattgcaagttttgaatttgttaatatccgtgttgttcatagattgttactagagatttagagggatcattttttaatttttcatctttggtagtcacatttccagttttctggcagtggtttctactaatgttaattgaattgaagagtgccatagcacattttagattcctggcatcatttaatgccctcatttttaagtcaagcaagatacagcatagtcttagggttagattgatagagtaaatcacgtttaatgcttatctattgttatcaataccttttttattttaaagaatttggaaagaatgttgtcttcttaagtcttgttttaaaatggctctgtaaattctacccgtttttaattttacatgcttttaattataggatttacagttatattgcgattttcctaatattattgatgtcagtattaagcaagcaaaccaagagggttcaaatgaaagccgagttgtaactatccataagcaagatggtaaaaatctggtaagtttgctttatgattgaataatggtttcattttatagttctcagaaatgtgtattttagaatcttagtaccaaaattattttctggtaggaattttgattgtagttttaaatataactctaaacatcagttcagtaaactttttgataacatctagctttttgtattactatcaacaccatcttcctacagagtttcttgtacattactgtactttttttactcatttttatgattagcaaagcaccagttactttctcccccatccctactctagattatactagttctctgatgtaatgctcacccctgactaaaatattttatcaacagggatgtatatgtgccagttatactgcctaattaaaggagaaaaaataaatcaatgatgtctggaatttatataacaaaatgtaaatcaatcccaggtcagccccacccaagctgtaggacatggttgattctaaaagattaacgctttctctttttttaaatagcttcagaaatctaatttattttaatgtaaataggagaaatgaattattttatactttgctcttaagtttctcatttatcttctctgtcttctttttaactcagatgcttcttgacccttcctggcttaaactagtcctattaatgttatttgtctatttatcttaagtatttatatggcttacctgtctggctgttccagggttatattaccaaaattgtaactaacttgcaactcacttaattcagcatagttttctgttcttagataaaaatatgatagtacacctactgcctagtagactgtgagccttttgaaggtaaggatcatatttttatgtgtgtttgtaccccctacaccttgcacagtactcagggcctagtttagaaaaagcttgataaatattttatggatgcataaaaggatgattaacaattatcaacctcaatgtggatatataataaatgtttctgggagagtttattgatcttaatgtgaacaaactgtagtaacccaaagaacttctccatgggactgtatttggacttggcttaattttaagtctgcaatacagagaagttaagtaactttccaagggcacagtgttagttaagtggtagggctatttaaactcaaatgcatgctttgaaaacctaagctcttaagtgtgacactaacttctttgctaagtatccgtaaagctccttaaaaatattatactgacattttgttggaattgtgcaacaaactgggaagagttgacatttctttctcatattaaattttttattttagggatacattgtatttctccttgtatacaagtattattttatgtttttcagtaattcttgatcattttattcatattgatacatcatgtttcttgctgaattttattcatgatatgttatgctttttctgttgtttattaaaattaatacttcttctctgtgtattttcctaccaaattatttatggatataggaaagtaatttttgcttattattgcattttcccagtgtattatgtgttagtaacattttgtttttactgtcattttcctcttcattctggcatttatttctctttataattttggtaaaatatatataaaataaaatttagcatcttaaccatttttaagtgtacagtttagtagtgttaagtatattcacttttgcatccaatttccagaactcttttatcttgcaaaattgaagtctacacccattaaataaaaactcaccatttccccctcttcccaatccttgcaaccagcattctactttctttttttttttttttttttttgagatgagtcttgccctgtcatccaggctggagcacaatggcgcgatcttggctcactgtaacctgtgcctcctgggttcaagcaattttcctgcctcagcctcccgatagctgggattacaggtgcacgccaccatgcttggctaattttttgtatctttagtagagacggggtttcaccatgttggccaggttggtcttgaagtcctgacctcatgatccgcctgcctcatcctcccaaagtgctgggattacaggtgtgagccactgtgcccagcccctctactttcttattctatgaatttgactactctagatacctcataaaagcaggctgaaacaatactgtctttttgtgacaggcttatttcagttagtataatatactcaaggttcatttgtattacagcatgtatcaatttccttcatttttaatatatgtatgtattctgtgtcatgtatataccacatttgttcattcatccatcaatgaatattcaggtcacttttttactttttgacaattgtgagtaatgctgctgtgaacatgggtgtacaaatatctcttgaaaactctgctttcaattcctttggatatataccttctattagtccgttctcacactgctataaagatactacctgggactggataatttatttaaaaagagggtttaattgactcgcagttcggcatggctggcccaggaaacttaaaatcatggcagaaggtgaagggcaaggaagccatgtcttacatggcagcagaagagagacagtgtccaggggaaagtgccacttttaaaccatcagatctcatgagaactccctcactatcatgagaacagcatgggggaaacaacccccatgattcagtcacctcccaccatgtccctccctcgacacatggggattacaattaaagatgagagttgggtggggacgcagagccaaaccatgtcatacctagaagtagaattgctggatcatatggtaattctacttgtaattttttagggagccaccatgctgttttccatagcagcggcaccattttacattcctaccaggagtacattctccacatgctcatcaaaacttgttattttctgttttctgatagtagccatctgatgggtgtgaagtagtatctcattgtgattttgattcacatttccctaatgattagtgttgctgagcgtcttttcatatatgtattgccatttgtatatcttctttgaagaaatatatattcaagtcctttgctcattttttaatcaggttttttttgctgaattatagaaattatttatgtattctggatattaatcccttttcaaatatatgatttgcaaatattttctcccattccatagattgcttttcactatgttgcttgtgtcctttgatgcgcagatgttttaaagttttagctagttcaacttttgttgcctatttttctttttactttgttgagatataacatgaacccagtaaagcacactaatcttacgtgtatagctcaatgaatttttacatatttgtacatctttgtagccacacccacctcaaaaaacagaatagttctcttactcctagaaggtttccacatgcatcttcccacatattcacctccacccctaacttaagatacctatcatctaccatcacttagttttatctattaataaaggttgtataaatggaatgatactgtatgtattcttttaaaatctagattcttttagttagtataatgtttggagattcatttatgttgttacatgtgtcagttcattcctttttattgctgggtagtattgaattgtttgactgtacctcaaattttaaatgtattctgttgatggacatttgggttgctttcactttggggattttagggataaatttaccatgaacattcttatacatattttttggtggacttatgcactctttttttgtatatatatatcctagagataggattattgagtcatagtgatagctttagtatactgccaaacaattttttgtagttctatcagttcactcttctttcagtaatgcatgaaaattacagttgtctcatatccccatcaactcttaattttgtcagtctaaaaatgtcttagtttgtctggtggatgtgtactggtagctattgtagtttttattttcattgccctggtgagtaatgatgttcaatactttttcacttacttattgttcatctgaatatccttcttatgaagtgcctgtgacagtcttttgcacatttttcattgacttgtccctttctgatcaatctgtagagtctctatagattctaagtcttttgtaggatgtttgtaaaacgtatatagacatacgtcagagatatttctagttcagttctggaccactgcaataaagcaaattttgcaatgaagtgagtcacataaattttttggtttctcagtacatataaaagttatgtttacactataatcaagtctactaagtgtgcaacagcattatgtcttaaaaattaatttaaaacactttattgctaaaaaatcctaatgataatctgagcctccagagagttataatctttctgcttatgagggtattattttgatgttgatggctgctgaccgatcagtgtggtggctgcttaaggttgggttggccaaagcaatttcttaagataacaatgacatttactgcatcagtagactcttcatttcgttaaagttgtctctgtagcatgtgacattgtttggtaacattttacccacagtagaatttctttagaaatgagtcagtcctctcaaaccctgccactgctttatgtactaaactttattctaaatcctttgctgtcttttcaacaacattcacagcatcttcacccaggactagattccatctcaagaaaccatttttttatgcataagaagcaacttatctgtccaaattttatcatgagattgtagcaattcagtcacatcttcagctctacttctaattctagttctcttgctatttctaccacatcctagtgacttcctccattgaagtcgtgaacccctcaaagtcatccatgagggttggaatcaacttcttccaaattcctgataatgttaacactttgaccttcttccatgaatcactgatgttcttcctggcatcaagaatggtgaatcctttccataagtttttctatttacccagctccatcagatgaatcactatctatggcagcttagccttacaaaatgtatttcttagataataagacttgaaagttgaaattactccttgacccatgggctacagaatggatgttgtgtcaccaggtctgaaaataacatgaatatccttgtacatctctgtcagagcgcttgggtgaccaggtgcgttgtcaatgagagtaatactttgaaagcaatctttttttctgagcagatcttaacaatgggcttaaaatagtcagtaaaccatgctataaacaatagatgtgctgtcatccaagccttgttgttccatttatagagcacaggcagagtagacttagcataattcgcagagccctgggatttttggaatggtaaatgagcgctggtttgaatttcaagtcaccaatggcataggcccttagcaagagggtcagcctatcctttgaagtttgaaggcaagcactgacttctcctctctagctgtggaagtcctagatggcatattcttccaacagaaggctgttttgtttacatttgaaaatctgtttgttagtgtcaccatcttcatcaatggtccttactagatcttctggataacttgctgtagcttccacatcagcatttgctgcttcaccttgcacttatgctgtgcacatggcttcttttcttaaacctcatgaaccaacctctgctagcttccaacttttcttctgcagcttcctcacctctctcagccttcatagaatttaagagcattagggtcttgctctagattaggctttggcttaagggaatgttatggctggtttgatcttctatctagaactttctctgtatcatcaataaggctgttcactttcttataatttatgtgctcacaggagtagcactttcagtttccctcaaggacttttcctttggattcataacttgcctttttagtgcaagaggcctagctttcagcgtgtgttggctttcagcatgccttcctcactaagcttaatcatttctagcttttgatttaaagtgagagatgggtgaatcttcctttcacttgaatactcagtggtcattgtaggattattaattggcctaatttcattattgttgtgtctgagggaatagggaggcctgaggagagggaaaaagaaagggaaatagctattcggtggagcagtcagaacatatacaaatttatcacttaagttcaccatcttatataggcccagtgtgtggtgccccaaaacaattacagttgacccttggacatcacaggtttgaattgtgtgggtccacttatatgcaattttttttcagccaaacatggatggaaaatatagtattcacaggatgcaaaacctgcatatgtgtagggctgacattttgcatatatgggttctgcagggctgatttcagaacttgaatatgttcagattttggtatatgcaggggtcctgtaactaatcccccttgtattctgagggacaactgtacaatagttacatcaaaggtcattgatcacaaatcaccgtaacaggtataatagtaataaagtttaaattttgtgaaaattaccaaaacatgacacataggaagtaagcatatgctattggaaaaattgcactgatagacttgtacttgctccacttaagtttgtcagaaaccttccatttgtaaaaaaaaaaaaaaaaaaaaaaaaaaaaaaaggtcatatctgcaaggagcaataaagggaagtgcagtaaaacaaaatgtgtctgtatatcaataagagggatactagttagtgaactgctagttcaaagggtatgaatatttacaactttgatagattattaaaatacttctcaaaaggtgtttccaatgtatctgtacacctgttttcttgtatcctttgccaacactggatgttatcaatcttttaatttttctgccaaatcaatgggcaaaataatgctgtcctgttatatttcatttccttaattagaacctgagattgagcaatacctcatgtgtttataggtcagctttaatatttatacttctgtggattgccttttcatgtcctttgactagttttctttttttatttttaattgttttatacgttttattcccacaatgtatgttaggtatattcctttgttatacatgtttgtaatctccaagtcttttaattttgtttaggataccttttatagtacttgtttttttggctatttgtgttagctaaataccttttatagttcaaacatgtcacatgcttgtctctttattataatttttggttgaggactctattctgtgttctctttatgattatgtaaatattgttcattgctgggccaagaaatatgctgtaatcacattttcgttcttatataactttttccaggagttaattattgctttatgatttttcctttgtatctagctttattttcattttctacaagaactctgtaaagtagtggacttctcaatacaaaatttcacataatcaaacctgtcatatatgatagcatttttacttcttttctggagaagtacctcttcgatcacagcatcttactttgtagtgtggactggaagttttctgggtacagctattattttgtcagctgtaatttttggtcattcctttcttatcctggtaactatgttttcatctctcttatattggatctgattttctaaatctcatgtttgccctgtttttctaggtacagcctctggtatttgttggtatctttaatgtgattgagacaaattagaaaattaatttagagaggatttttacatttttatgatattgaattttcctaccatggttaatcttctatatatttaaataaaaagttgcataagagtgttttgaagtttttgttaattattgatattgcatcctctttgttacaaatggggcttttttcattatataactgactttttgtatgtaaaaatataatacgtctatatattttcccatgtaagtaacatgctgcatttttggctgactacatgttcacatatgtattaagatacaatcaggccgggcatggtgactcacgcgtgtaatcccagcactttgggaggccaaggcgggcggatcattaggtcaggaatttgagaccagcctggccaacatgttgaaactctgtctctactaaaaatacaaaaattagccgggcgtcttggcgtgtgcctgtaatcccagctttttgggagactgagacaggagaatcgcttgaacccaggaggcagaagttgcagtgagccaagatcgcgccattgcactccagcctgggcgacagagcaagactctgactgggcgggggccacaaaaaaatcatagcatagctacatatcctaacattttagtttgtagcatgaatactttagcagtatgtaattggtatgtagggctgatgccgtggctcacgcctgtaaccccaacactttgggagactgaggtgggtggatcacttgaggtcaggagttggagaccagcctggccaacatggcgagaacctgtctttactaaaaatacaaaaattagctgggcatggcggcatatgcctgtaatcccagctactcatgagggtgaggtgggtggatcgcttgagcctgggaggtggaggttgcagtgagccaagattgtgccagtgcacttcagcctgggcgatggagcaagactctcaaaaaaaaaaaaaaagaaaaaaggaaatgctcatgatttctaatgtcaacttttatatcatattaaatagatttctagctgagataactggtatattagtctaagaaggacattggaaaataaagtaaaatgatggctatagagtgaactataactgggaaggtatgataatctgtatttaggaggatcttaaatatcagacatgagaatttgtaattcatattgagtactgagccataaaagatatgagcaatttagaagaaaattgtatttaacatggaatgaagaaaattttcaatatttaacatggagttgactttctaaaaggtgctatttctttttcttttctctgcttaggaaattgaacttagctcattaagggaagctttgtctttcgtgtcattaattgatggatattatagattaactgcagatgcacatcattacctctgtaaagaagtagcacctccagccgtgcttgaaaatatacaaagcaactgtcatggcccaatttcgtgagtaatacagacttaaaagtaaatttttagaaaagtaaatgctgtatttacaaagaagatttaacagagtgatacatgtatgtttagaaaaaaataatttgacaagttttttttaaacaaaaggctatttgcaatcagattacataataattagaattatttagtgtataatttaccatctgtatcccaatctataatatttataagttgtacaagtttaacatttgttaatcatgcctatgtgtgattcactcctgcatgttactaaaaaagaaagatctccaatttatgttttattaattttaaaatactgcaaggaagccacagtgcaaaatttgaaaattctttatgtttggatagtccatctccttctactgaaaggttcaaacacaagatatatatgatgtccacatttctagactagtgctatgtagaacttcctgcagcgatgaaaatattctatatctgtgctgtgtaacacagcagccactagctacatgtggctgtttagcatttgagatgtggctaatgcaaccgaggaactgaattttaatttaattttaatttctttacatttaaatagctacatgtggctagtaactatcacattggctcacacagttgtagatccttactttaatactgggtaaagctagctatcatgcataacatctatttagcttaagtcctaatgatctcttagctaggatgtggtttatgttgacaacagatttgaataactcgagcaaagggaaaatctgggatcatgagcatattatgttctttgcatttaacctacccctaaatatttgagaaaatacatcttgggtaatataaagagttgatttagtctatgcttaatatttatttagtaatgaatattgttgctatgaaaaagttgtactacttgaactttatgtctgtaatttacatgtttaatatttttaaaactccttgcctttattcatgtatccataaattcattcaaacattcttttatttatatttactgagtaactactatgtgcaagcattggtttgtatattagaaatatggtgataagtgaaacagaatgattctttcttttgtatagattatattttgcttttctttcagggtgtgcagcttcagaaaacataaaaaattttaaaaaccagtagtctttgtcagttgccatggttcttctcttagactttgttatcgtactgaataataaaatcatgcattcagatttttatgtcagtaactgctatggtagtagagatataagtattttctgatatataatctttatagttaaatgaaggtttctgagagtatggttttaaaaatattaactttgtaatcagcaggcagaaaaatcaaatgaacaaattgttctttgtgattttgtcttataaataccttttattggtttttaaagctatataattgtcccttgaagtggtttgaacttactgcaaaatagcttggtactttgattttttcctttgaaagattattgctaaacatataaagtagaggagacaattctgacagttttagatttgacttttgattgttttagatgacacttggtcataatattatggtgcttgatatattattcaaattgcttcttctttacctttaggatggattttgccattagtaaactgaagaaagcaggtaatcagactggactgtatgtacttcgatgcagtcctaaggactttaataaatattttttgacttttgctgtcgaggttagtatgtcacacttattagtggtaacactttatttagttcatttaatttcctctccatatttatttaccatatttcctttttaatactgagaattatagctttggatatgataactagtataatgcttaatttcctcagagattctgtacaaataaacaagttataattcccagggtttatataaaaatataaaataatttataatgtctatctttttattttgcatttattttattttctgatgttttggtgttaccagtgtgttaaaaggtatttcatcaagtgtcttgatgtttctttgtttgcaaaactggaaatctttgccacatcatgtagaacaaaataaatcggaagcaaattttctgtttattaacagtggttgcagaattagaggaaacagaattagagaaaactaggtcaataacaaacaaatagaaacattaaagcacttttaactgatgattttctaatatttttaagaatagtggtctacaatgcatgtttcaacggtaaaactgcaatgaaaccccactgttaatacagatcattttggatctcatctatgattatatactatcacttatgaggcaatttcatggtataaatcctaagaaactatagaagcttgcaaatttatcttgcttttttaaaacagagaaaaataagaactttgttattcaattattttaatttttataaaatgcaacttatatttggcatatgtagagggtagattacttacagaagggaggttatgccatcactttacctttgtgtaaaactggtaatctatcctaatttcaaagtatcctgttactataacagataatagtacattatattcaagtatgaattcaaaaaaatatatatatatattttatgttcactgtatgtgccaagcctaatatgagagctatgtattatagagtttatgctacagccctaccttcaggaaacttatctactggacaaacaaaaattttcaaatatacaaaaaattctaaatcgaacattgtaattatctagcataggcaaatatagacagtaacagacaggtttacaattattaagaaagggcagccaggtgtggtggctcacacctgtaataccagcactttaggaggccaaggcgggtggatcacgaggtcaagagattgagaccatcctggccaatgtggtgaaatggtgaaaccctgtctctaccaaaattacaaaaattagctgggcatggtggtgcgcacctgtagtcccagctactcgggaggctgaggtaggagaagcgcttgaacccgggaggtggaggttgcagtgagtcaagattgtgccactgcactccagcctggcgacagagcgagacacggtctcaaaaaaaaacaacaacaaaaaaaaaaaaaaacaagaaaggttatttggcataggaagaacctgattgaccttgaggtattggtagattttatataaatgtttctgagtagaatgaatatgtttataaaatgcaccttaaaaataggtgaacaagttcataatatagtgcataagacaaatatttaaaaactgcaaaatattaaaaatgtaatattaaagataattatacaaatacaatggtggtgcagtggaatggctgtatgttcacctttgcttgtgcaaagaggtgagcattagagaggacctcttagaaacagtggtacttgaactgagttttgatgaatgaataaaggttcattgctcagaagaagtgggtatacattcttaggtagaaagatagcatgaagaattatcaaggcatgaagcagcatggcatttgcttgaaatgatttaagtcatttaatatggctggaacgtaggttgtatgttggcagtggcaggagctgagattggagatggaggcagaaaccagctcatggaaggctctatatgctacatttgttttaggctttatcttataaatgatggaaaactattaaggatggtattgttgctattaattatcattgccttcttacatgctttttcataaaatcaacttttaaaccacttttgtaggctgagaaattgtaaattgcccttttgaggaactaagtacttctatcactatactggcactacatcggattcatggttcaaatgtttattctgttgcttgttcttgtgatatcattttgtcagaataatcactgtgatgtccattgtgactatccctccctttctttataattaaacttatacagcgagaaaatgtcattgaatataaacactgtttgattacaaaaaatgagaatgaagagtacaacctcagtgggacaaagaagaacttcagcagtcttaaagatcttttgaattgttaccagatggaaactgttcgctcagacaatataattttccagtttactaaatgctgtcccccaaagccaaaaggtaagataattttctagttatttttaaattactggtcatggattgtttatgtggcgtgaagtatcttcagtacattgatttcaaaggatatatgaaagaagcagctctaaaagttaattttatcttattctattgtacaagcatcatcaaataagattgtttactttggttttggtggtctagaagtgacttgaagttcaattattctaaaatgagattttaaacataatgtgtggtatgatgtcatttattgaactggaagatctcactactaaattcttatgttgttttaagtaaaaattttcatatacttcgaggattttaatttctgtattttaaaaataaagacagtaaagttggaaattccttgaaataatgagccttactattaaaaattattaaaattcctgaaaaattgtatgagttaaggaagttactataattttgaattaatgaaataactggcaggaatacatcaaaatccaaattacattagttaaggaagtgattataattttgaatgtatgaagtaactaagaagaaatatcaaagttcaatgagttgacccctaaaataattttctattataaaaaaagaacaattaggagttattaagcatttcttatacgtagaacacatttcattttactcctctttggagcaattcatactttcagtgtattttgaagtgatatatatgtattttattttttcagataaatcaaaccttctagtcttcagaacgaatggtgtttctgatgtaccaacctcaccaacattacagaggcctactcatatgaaccaaatggtgtttcacaaaatcagaaatgaagatttgatatttgtaagtcattagatactcattactgtcttttttgtccttttaaaacaacatctgttttcttgatttacattcatgtgacattggaattattttgttatatacaaatttagttgtgatttaaatatttttcttatgaaaaatatgccaaccttgtgttagatgttagcaaaattaattatcttaattatcctaagaatggaatcttaattttctttttggaaatttaaaaatgattcttcacaaatctcaaattaaaaattaaaaatctacaaagacctatatcgcaactcccaagttctcaagaaagtaagggaaattcaaggggttaaaaataaagaagaaactgagaaaaaaatccagccatctctcagtgtccatgagggattggttccaggactacccatggataccaaaatctgaggatacttaagtggaacctgtggatatgaaaagttggccctctatatacatgggttttgcatcctatgaacactgtatttctttttttaaataactaattattttttaaaattatttatttatttattagagcaggacttgctgtgtcacccaggctggaatgcagaaatactatattttccaactgagtttccttgcagatgcagaacccgccctgccagtacagagggcccactggatttattgaaaaaaacccacatataaatggacctgtgcagtccaaacccatgctgttcaagggtcaactgtagtacataagatctgataatctggcagtcaggtggtgagggttgatgatcagccacatttatcaagggggttaagatttaagagcaatttaaaagggccaggtctcagacctgtgcaaggccacgagttaaaagtgagactatccctgagtaaaaccaggacacttaagtaaatacatcctcagtaaaacaatatatagaatgtgaaaaattcacccactagcaagcagagaagaaaaggaatattgtcatttttaactgcgcttctggtgaggaaaaggagtctctcctaagaatttgtcatcataagctttggaatttgggcttcattatactacctacatagactgagaaatcctaaattaaaagtggtactctcctaatattgtgtggtgcttggaagaaacaaaaaaatcttttcggaaccacatactcttaacctaggcaacccataattcccacagataaaagcattgcaaacacaagcttttaatagaaaatttagaaacatacaaggaaataatgcaggattaattaagagtcagtagaccaacaaacatcaaaattagaactccaggaacttcctatcacagaattttcagatacagactataaaatacatatacatgtttaaagatagaaaaggaattgaaaccacggagaaataacaagacattgttttaacaaacaaaaaagatgtcaggaaaaaggcatagaaatgataaatatcctcattgacattaaaacagaatatacaggatgaaaagtaaattacttatagctgaagagagatgtagtgaacctcaagacagatctgaagaaattaagaatgcagcagttagggagaaagaaatggattatatgaaagagggattaagtggcatggaaggcaaaatgagaaagacccaactcatatctgagctctataaggagacaatagatagaattagccagaatggtaaagacaagcatcttcatgtgagtaacaggaaacagagtggccaggtaacttgactaacattacaaatctaataaatagtagaccttggatttgaacacaagcagccttactgcagagtgcaggctttcaacaattactttgtaaagatatgcaagaaatactagtattagtagtaatagctgatacttaatgcacatttactatgtgtcatggactgtgctaagtgcttttatgtatttattcacttattgatcataacaatcctatgggaaaatagttattattctcatttttcagatgaagaaaccacgacagctgcagcacagagattaaatagcctgtacaaggtcatacaagtggtaataagagaaagtcagatattctgcctctgcagaccacattctctagtgtgctagtaggaaaggcaaagaaaatgattcccatgtaagcaaatgtaggtaaacactgactctatttttaaaaagtgacaattatagcccattcaggagatttcaaaaccgagtagagccaaaatacacttaattcattaatccttgttttctgtctcttattactatttaaggaagcagaataaaagcattaatttggagtcttaaatctggatttagattctaaggaaaatacttgcttatggatttaaaaaaattcttcctcattgaatgtattttcttgttcctacttcgttctccatctttactcattcttttcttttacctttttctcttgaagaatgaaagccttggccaaggcacttttacaaagatttttaaaggcgtacgaagagaagtaggagactacggtcaactgcatgaaacagaagttcttttaaaagttctggataaagcacacagaaactattcagaggtgtgtatgttctttatattgttcatgtagtttatgctgtttaaagatgtgctctcatatgcatacaacgtactcatgtgtgcagcttttcaaaattgtaatttttaaatgtgtcaaggacttttctgaggatacattcttgtggggctatagaattacagggtttgaaaattaccggattaaaaaaattaattccaaactaattatgtttagcattatgttaggagtgttattacatttctgcatatactgtggccttgattttcaaacttggctccccagagctttatgggttacacagaggctcctctacaattacatttatttgaaaaaaaaacaaaaaaccaagtttcaaaggcactgtactaaggaacatgcttagtgaaatctagatgcctctgggcatcatccagagatgctagctggcagaccccgtggccagttgccagagctctgaacatagcaagatatgatacttacaatatcttaaagggtgttggtgttagaagatgatgtgaaaagttcaagccaaagagttgttctaatccagaataccacagtattggtgattgtgattcactaatcatacccaggggttctagtcacagtttagttgaattagagtgatgttaaaactatgctagtatcctgacacagatgtcgtgatattttatctgcacattcttaattctttagcaagtgttatttaaaggctacatccatctacctcagtttcctatatctatctctgacatctacctctagttgtacttctgtcctctatttcaggtgttatgggtcaagcctgtttgactggcattattcatgattcctgtaccactcttgctctctctcactttgatctccatattccaggcttacacaggggtttcctcagaacgttgatggcagttgcaggtccatataaagggaccaaagcacattgtatcctcatctatagtcatgctgaaagtaggagaaagtgcatctttattatggcagagagaattttctgaactatttatggacaacagtcaaacaacaattctttgtacttttttttttccttagtctttctttgaagcagcaagtatgatgagcaagctttctcacaagcatttggttttaaattatggagtatgtgtctgtggagacgagagtaagtaaaactacaggctttctaatgcctttctcagagcatctgtttttgtttatatagaaaattcagtttcaggatcacagctaggtgtcagtgtaaactataatttaacaggagttaagtatttttgaaactgaaaacactgtaggactattcagttatatcttgtgaaaaaggaaagcaatgaagttaaaagtagaaggttacaatgcccaaacaatagagtattatagtaaacaaatgtctataaaacattttgtgttcatgatagcaaaagagattatggcaggttcaacataacattggaataactggccttttcagtacaaacttatctggaattatgaagacaaagcatataaatgatacacttaatttttaatggaactgacagaaatgattatgttgatatgatactagatatattttttggctaaatttaggtgttcacagaaactactaaaagtataaatcgtaccccatgctttaatactatacaggcatgcctcattttattgcaccttgctttattgtgcttcttagatattgtattttttacatattgaaggtttacggcaacccagtgtctagcaactctgtcagcaacattttcccaacagcatgtgctcatttcatgtctctgtgtcatattttggtaattctagcaacatttcaaactttaaaaaaatcatatggtgatctgtgatcagtaatctttaatgctagtattgtaattattctggggtgtcccaaacagagagaatataagaaggcaaacttcatagatgaatgcagtgtgtgctctgactgctccatcaatgagccattcctctgtctctctccctctcctggggcctccctattccctgagacaacaatattaaaattaggccatttaataatcacacaatggtctttaaatgttcaagtgaaaggaagattcacccgtctctcactttaaatggaaagctagaaatgaagcagcaaacgctgatgtggaagctgcagcagttatccagaagatctagcaaagaccattgatgaagatggcttagagaggaaggcatgctgaaagccaagacaagctgaaagctaggcctcttgcactaaaaaggcaagttatgaatccaaaggaaaagtccttgaaggaaactgaaagtgctactcctgtgagcacataaattacaagaaagtgaaacagtcttattgatgatacagagaaagttctagatagaagatcaaaccagtcacaacattcccttgagccaaagcccaatctagagcaagatcttaatgctcttaaattctatgaaggctgagagaggtgaggaagctgcagaagaaaagttggaagctagcagaggttggttcatgaggtttaagaaaagaagccatgtgcacagcataagtgcaaggtgaagcagcaaatgctgatgtggaagctacagcaagttatccagaagatctagcaaggaccattgatgaagatggtgacactaacaaacagattttcaaatgtaaacaaaacagccttctgttggaagaatatgccatctaggacttccacagctagagaggagaagtcagtgcttgccttcaaagcttcgaaggacaggctgaccctcttgctaagggccaatgccattggtgatttgaaattcaaaccagcgctcatttaccattccaaaaatcccagggctctgcgaattatgctaagtctactctgcctgtgctctatacatggaacaagaaagcctagatgacagcacatctgtttatagcatggtttattgactattttaagcccattgttgagacctgctcagaaaaaaagattgctttcaaagtattactgatcattgacaatgcacctggtcacccaagagctctgatggagatgtacaaggatattcatgttattttcaggcctggtgacacaacatccattctgtagcccatggatcaaggagttatttcaactttcaagtcttattatctaagaaatacattttgtaaggctaagctgccatagatagtgattcctctggtggatctgggtaaagtaagtagaaaaacttatggaaaggattcaccattctagatgccaggaatagcattcatggttcatggaaggagatcaaaatggcagcattaataggaatttggaaaaagttcattctaaccctcctggatgactttgagggatatggtactttaatgaaggaagtcactgcagagatggtggaaacagagaactaagaagtggagcttgaagatgtgactcaattgctacaatctcacgataagccctgaaagaaggaggagttgcttcttatggataagcagagaaagtggtttcttaagatggaatctactcctagtgatgatgctgtgaacattgtgaaatgacaacaaagggtttggaattttacataaacttgattgatcaagcagttgcagggtttgagaggactgaccctgtaaagttctactgtgggtagaaggctatcaaacagcattgcatgctacagagaaatctttcatgaaaggaagagtctgcagtgaatttcattgttgtcttattttaagaaactgccacagctacctgaactttaagcagccaccaccatgatcagtcagcagcgattaacatcaagcaaaaagattacaactttctgaaggctcagattatcattagcaccttttttggcaataaagtatttttaaaaagatatattctttgttttttttaagatataacgctgttgcacactaaatagactccattatagtgtatatacaagttttatatgcattgggataccaagaaattcatgacttgctttattatggtagtctaaaaccaaactggtaatatcttcgaggtatgcctttattttagtgcctcacaaagtttacattcaagaaaattgtttatataattccctattttccactagtaatgcagattaaatacacatctacacttgtatgacattttttcatatctttgaaaattgataatcttctcaaaagcagtggtttggaacctgttatatggaggtatctgagaggctcctgtggaccatgaaggaatccaggattgtttttggaagccaacacttgtttttctggcaaaatatgttttatatatttttttaaaaaagttttaaagataaagcagcgcaaaacatttctgtattttttgcagaattaaaagattaaatggagctagaactcaaattctcctttatgtctatagtactatagacaattgttagtaatttttgtgtgtagaagaacttcaggaaggtttgaatgtctaaaaagttatgtggaagagaaattgagaaattttcatttatttttaaaaaccagccataattcagtactaatatataaaggtgtgctggtatattatatattatacatttatgttatatataataatatataattgtttagactcctactcttgctgttgtaagtaaactaaaaaccaaaaatataatgctgtgtatccattaagttttctttaaagttgtgagttttgccaatttaatttctttacctataatggtcacatgtaagtataaagatttaaattacatatatttaattatatttatacttaagccttattattattacttatattttaatgcagatattctggttcaggagtttgtaaaatttggatcactagatacatatctgaaaaagaataaaaattgtataaatatattatggaaacttgaagttgctaaacagttggcatgggccatgcattttctagtaagtagtacaacctttttatcaaaagatactattttattttataaaacaatatacaaattatctttacctggaaacaaaaaataaatctgtaattggatgccaattcatgtaaaatagtctgtgttaggtgataaaaagagattactttaggcatatgtttatgtatgtaaaatcacttttgaaaaaaaagttttgtcatcccatcaatatcttagaactactaatagacaatctgtatgttgtgtcttttggatttagaaaattcaaccaaaaattatgcagaagtatgtgcttctgtatttttgggccattgtacattatggtccatgagaaagcggtgttgacagagaagaataccagggggactgccagtcatcagacccctcagggtgcacctatgtcctgctgcagaactgaagtagtatttcttaatgtcagctcccatccagaaacacaaaccatgtcagccttagaactcatgtgaaatggcattggtagttttaatttattcatttcatcacaagcatagattattgtgttatttaaaatgtaaaacaggaagcataggagtcataaatttccttttttctcaatgcatgcctccaaattattatactatcatgtatttttcttctttaaatctgttttgggggcttgaacatactaaatgctccagtacttgtggactgatatttgaatatatgtgcgtttaactctaataggaagaaaacacccttattcatgggaatgtatgtgccaaaaatattctgcttatcagagaagaagacaggaagacaggaaatcctcctttcatcaaacttagtgatcctggcattagtattacagttttgccaaaggacagtaagttctagaaggattatatataatgttactaagctttacttgggcagtggtgtaaagggcatgttgttaattttccttgaattccatttaatttgtatgttcctgattaataataaaattatcacttttagcaatttaaattgttagttaaatcttagtctctatttttctttcttataagcatataaccatggactgtgaggtgattttttaaaaacagttttaatctctaattatgtatgaaggataggattttatccatttttagtatgaagttttgtaatattccttgagccacaagtaaattttctaaatattcttttcttctcgtcactaaataaaaatttagcctgagattttaggatttttttctatcctctgtgaagaaattagtttaattatccagctaattctgactttttaaaaccttaaaaaaactttgatttgtgtttgttcatctttactacttaacacagtgggttaaaaatacaaatttcagtcagatagttgagaggggttttttgggtctagataattataactgaattttgttatcttagataatttctctaattggatgttctaaatttagattctaaattgatcaatttttgtgcactgatgtgtcctatttaagctaatagtacttaaacttaatgacttatctgacagtgaagacagtgataactgggcagtagtacaggagtagggagtatggcagaaaattcttacagggtcttacatctggtatcctggaaaattttatcctttggaatcggaagtgaagatggaaaaaaatgtattcatatggtgaaggtatttgtcaatcaatctatttgtctgtctgtctatgtcagaataccagaaagtagggttatattgcttcttcctttcttgaatacagtccttctggtggaatcaaagaccacagaaactttacttgagaaattccgtgatttgagcagagcccacctatatcaattccatatatctagaatattttggtgcaatttagccttccatctgccataaatgcttgttggtccttgggtttttttttttatctgcaagtgggaattgccatggctattaaatcattagaacatctctgaatgatgtaacattacctttactacttacgcattatgaagaaataccaaaaagtatcatggggcaattttaggataaactatataaaaaaaaaagatttggccaggtgcagtggctcatgcctgtaattccaatgctttgggaggctgattgcttcctaaagcgcttgggtggatcacttaagcccaagaggtcaaagcatagtgagctgcaatcgtgccattgcactctagcctgagtgacacagtgacaccctgtctcaaaaaaaaaattttttttttttgaaggtaaaactaatggaaagaggttgagaaaatggtatgccagttgagacactatggtttaatggaaagattagttgattcagaactcactgtacaggattctaattctgtctctgctgctaacaaattgtgtggctttgggcagattactcaatcatatgtctccatgttgtcattgttaaagatgaaatattgaattagatgatcttgaaggtcccttctggttcttaagcttatgcagtcatgtgcatgtgcacatccaacccctccaaaataaagaaaataggcctgattattcaaatgatttgaactttaaagctatttacatataaaagattggtttacttgtgaattatttaaccctactctgttcgtatcatttaaaagttcttcaggagagaataccatgggtaccacctgaatgcattgaaaatcctaaaaatttaaatttggcaacagacaaatggagttttggtaccactttgtgggaaatctgcagtggaggagataaacctctaagtgctctggattctcaaagagtaagtttatatagactaagttagaattactctatctctgaactttcatatttctttcacatgatttgtattttttagcccatctaattttaaaaagaaggttggtgtggcattacacaatttattctcagtttgtggttctttaattatagaagctacaattttatgaagataggcatcagcttcctgcaccaaagtgggcagaattagcaaaccttataaataattgtatggattatgaaccagatttcaggccttctttcagagccatcatacgagatcttaacagtttgtttactccaggtatgtatttgaatgatcttattgattttccagctttctatctttattgtatttaatgaatcattactaatttttaattcctttaaaacattttcttgatgtcatttgggccctcttaatttcttatgttcatatggcttttcatgctttatacatattctaatctccttgactgagaattattttcatttttataaaaagaccttttctttttttttttttttttttttgagatggagtcttactctgtcgcccaggctggagtgcagtggcgcgatctcggctcactgcaagctccacctccaaggttcacgccattctcctgcctcagcctcctgagtagctgggactacaggcgcccgccaccacacccggctaattttttgtatttttagtagagacggggtttcaccgtgttagccaggatggtctcgatctcctgatcttgtgatccgcccgcctcggcctcccaaagtgctgggattacaggcttgagccaccgctcccagccaaaaagaccttttctttcagtaacctaattttagttttccatttagtgagttgtaaattatagtattttttttttgcttaaattgacttttaaaaaacaattctctttaacatttctcatattttataattgattgattctctaaacatgagctgtatttgttttgctttgttctctcctttttcaaaatactgagctgaaatgcatgtgtttgacctataggtgctttctaccccagtactactcacctttctcacaataagtatcagtatattaccttactttatgaatactaaaacttcttattttggaaaacaaaattttatcctttgcaaagtctctcttgaaggcctgtcagattatgggtaatgattaaaggctcccattaatataattgaaactatttgagtttccctgtatcatttagtatttttaactcacgattattttggtcaacttgaatgtatatcagtttagtccagagaatgttatttgctaatttaaggtgataatattctttatttctccagattatgaactattaacagaaaatgacatgttaccaaatatgaggataggtgccctggggttttctggtgcctttgaagaccgggatcctacacagtttgaagagagacatttgaaatttctacagcaacttggcaaggtaaattgtcagaattttttcaaatagagtataatcatttcatttaggaaaaacttaagagcgtttctaaagttcactttctacaacattttaaggagtgcttgtagaaaaaaaaggtttggttgtcagatgttggagaaatgctgtgttaaataaacagctatctttactgaatgaagggggccagcccctccacacctgtgggtaattctcgtcaggtgggaccagagactgagaaaagaaagaagacacagagacaaaagtatagagaaagaaaagtgggcccaggggaccagtgctcagcatatggaggacccgcaccaacactggtctctgagtttcctcagtatttattactgttttcactatctcagcaagaggaatgcggcaggagagcagggtgatagtggggagaaggtcagcaagaaaacatgtgaggaaaggaatctgtgtcacaaataagttcaagggaaggtactatgcctggatgtgcacataggccagatttatgcttctctccacccaaacatctcagtggagtaaagaataataaagcagcattgctgccaacatgtctcgcctcccgccacagggcagtttttctcctatctcagaaatgaacaaatgtataattgggttttataccgaggcattcagttcccaggggcaggcaggagacagtggccttcctcttttactaatcctccccagcacagacccttcacggatgttgggctgggggacggtcaggtctttcccatcccacgaggccatatttcagactatcacatggggagaaaccttggacattacccggctttccagggcagaggtccctgcggctttccgcagtgcattgtgtccctggtttattgagactggagaatggcgatgacttttaccaagcatactgcctgtacacattttgttaacaaggcacatcctacacagccctagccttaaaccttgattccatacaacacatatttttgtgagcttcaggttggggcaaagttacagattaacagcatctcagggcaaagcaattgttcagggtacagatcaaaatggaatttcttatgtcttccttttctacatagacacagtaacacactgatctctctttcttttccctataactgaagaacttttcagaggctttaacatgtaatgtgcatgaacatcttcaagaggaagatgaattaggcagtattattcaaattgacttgaccaagagactgttccttggtagcaggagttcattgttaagtgattcagtgaaatacagaaaggaatacataagcttttctgcctgcctttctgcctttagttatctcagggagaattaatcttattgcttagggtctaggattttgactgtgccatattcactagcagagactctgtctattaaaacgtcacacagtcatgtataacctacatattataagtaagaccagggaatgctcagttcttagtaggtccaaccatagtggtaagctctttctcgcataagcttgctaggataaggttctcactagtaagtaccatgttagtgttgtctgttattatcagctattcctaaattcatattttcctgaaatatctccagatgtcattgattttcctcttttctgggaacttatagcatttattgtttcttttatacaacttaatcacagtcttctgttgtttattagatcttggtttttgtttgcttgccctttttttccttgacttaaaaaaagttcctttagatcccaatagattactaggcacacaattttgtcatatattgtcaaaacaatggaatatatactggtatttaagaagtagacataacaaagaatacatcaaaagatcactaatttagattaacaaaagggaaacagcagactaaattataaagttatcttttcaagtaatttttctagttatgaaagtgatatactgcttatagagaaattggaaaatattacaatgaagatacgttccatttgttgtagtctctgcacaactacacaatttctttcaatagtgaaaccattctatatatacaattctatatcttgctatttttcatatatcaagattttcccattattaatattcttttgagacataattttaagtgaatataccataatttatttacaacattcccctttattgtaattttgagttaatgttcttttgctttttaacatttttagtgttttccatagttccgtgagcttaaaattcttttaaacataagtaaattgaagagactctaaggaaggcgttttcaaaatacatgtacaatgaaatatatttcttagtaatttagtttgtaggaaatgaaaggtaaatggtgtaatcattagtcagtcatagatattttaatgtggatatttcctatctgtatttaacaccataattttactttcatctttgtttgtttgaagtaattgatgtgttcagtggtttgtctagatatttgtactgccttactgaaacaatcaaaatgccattcctacaaaaatgattgcatgtcacctttccattttataaaaattagctactgtatccctttgttatccttttcaattagtggtatggtgaaaatattccaaagagggatatatatttaaaattattttcatatgttttaagccaagagaaataatggtatatttttttattttttaaaaaatattttcatactgttgtaaaaggagccaagaaactattgtgaaatcttttcttttgctatttgaaatctagagtgttttttgctttcttcctttatcctcatgcccacatatacttatattcttttttaaattaattttaacatggattatttgtgtaatagccttacatgtggatattaacagtgtaaacagtaccacatataaccatcaagacacctcaattagaatttataggactagaatgacagattcagatggtttaattacatttaaaaagttttctgaaaaaacttttgcaataaaacaaattgcccatcaataagtttgatatcttttaaaatgatttttggttatctgcacatgaagcaaacaaagtgtattccacaaaattcttaggcacagtctgagatagctgccagaaagaacagaaagagttgtcatttatgtcttgtgagtacaatttctgaaagttgaatgagggcgtctctttctggggatgagaagtttactgctctctcttattgcttcatggcagtactgctgggcaaggtaggttgtttgttttacaccatcactctgtaatacatactgtggagctctgtctacatctcccggcaaactgaaccatctcatgatcatagcattcatttctgggaactgctgacaggcaaataggacaggaccagtggctaacctgagattcacatcagctgatgttggtttgcctatgttagaacatgaggtgaagtcgaatacatcatctattagctgaaaagctattcctacattttttccgtactgataggtgatctcatgcaccactgggtcggggcatcctagaacagagactgctttacaactgttggctatcaggctcgcagtattcttgaaggtcttttcaaggtattgtgcaaatctctcatgctcattttcttttgacccgagctgaagaaattcaccacacaccaaatcttcaataactcgggttaaaatagatataacagctgtatttccagtttgtgccccacctatagatactacagaaagaattaaatctccagcaaggacagccttcttttcaccccagatcttgtgtgttttccttttcgagaacgtgcattatcaataacgtcatcgtgaacaagactagcagtgtggatcatttctgcaattaaggctgtggcgcgctggctagcttgcacatgtcgggagttattatgatgaatattacatgctcgggccattagtaccacaataattgatcgaaaggcttttccttttacatcaaagtagtactcagagatttccttaagttctgttgttgatatgagcggttcctttctaataccctcatacagacctttcaagtctctccaaccgagtttgaaaggatcggtgtatttctcaccactgtgtgttttgctgtacggggttgtgtgatgaaactgtgatatactatatacatttggacaggcaggtgttaaatgcttcacaagattaaaatagggtatctgagacaagtcaagtcccttctgcctatgagcctgcgcgggcatcggcagcggcgcgcggccccggcggccccgcaaggctcggggagcggtctccacgccgccggtctccagcaacagccgcgccgcccccgccaccagcgcgaggccacggtcggagtctgaaagtcgcggtaggatggtggctccgcctctggcccgcgatcctcctgccaggacctggagcctgaaacctcttatattctttatatcctttaccttctcgcttcactcctagcggttttgaaatcctctttattcctttttcctccatggtgcagatatgggattcagagatcaggatcttagtgcgactactttgaaattatcagcatcattctcaatcttctctgaatatgattcttattttcctctcttcccatcattagctaacatcttggtccacattccttgaatacttttagtactcattgttttctcatcaccttacctcctgccattattttggatgcccttccaatacttaaaaaaaaaattccttggcttctctaccccaaagttatgattatgttaaatgagttcctttgaactctataatcccatgtaataaccttacttagaaaatttcctaccctgaaatctccctgtctgactataactttatagcctttggcttttttcaacataaatgccttctttttgatatctttggtattgctagtgtctttcacactttcttcttattggaacgtaaattggtgaccctttctagagagcttctcatagagcagtttgtatcaagcgcgtttaaatgttcatatcttttaaactactttcgctggtatccacaattatatcacccccccttcccttgattatctgcttcactttccctattatttcctagtacgggaacaatacaacttagcatttttaaattgtgcttccatccctcaaacactaaaagaaaaaaatcagatataaatctttattgttttcattgaaaattggtttccaacattggttaggcacttatgactcttactggttgtattagtctgttctcacgctgcaaataaagacatacccgagactgggtaatttataaaggaaagaggtttaattgactgacagttacccatggctggggaggcctcaggaaacttacagtcatggcagaaggcacctcttcacagggcagcaggagagagaatgagtgccagcaggagaaatgccagatgcttacaaaaccatcagatctcatgagaactatcacgagaacagcatggaggaaaccacccgcatgattcagttgcctcccaccaggtccttccaatgacatgtggggattatggggtttacaattcaagatgagatttgggtgaggacaatgccaaaccatatcactcccttacttgatttctttcctggtcctatctcaaacccttctggttttctatcttaaatctttcttttcgctgtatttttcttcatctccttcttccataagaaaaatagaggcattccgaattaaaagtgagactgatttttgcctatcaaagtgacaaggatttagaaaaagtataatgatcattgttggcagggatgtgataaaatatacattttcccactgcttattggaacatcaaatggtaaccactgccagacagcttctaatgcagtgtgtatcaagtccctttgaaatgttcttatcttttgaacagctaattaagtatccttaatagagatgtacacaaatatttatttataagaatattattgcaatgacatgactgtatttaaaaatttttcttagtgtacatttatgtttccaatgttaaaattagtgcattcgtgtgacaatatacaataattaaaaattattaatttcaaggaatatatagtggcactagaaaataaattttatgaacacattgttaagtagaggggaagaagataaaacttatttcctacttttgttttctaaaatgtgttttggaataatttctcacaacagcctcatgagatagacattttattattctccactttaaggatgaaaaacctcattttagggagttctgaattgtccgcggtcacagagagagcaagttgtggatcaatattctagttccaatctgacttgagagtcctgggtcttgagagtcctgggtctatccaccttattgtgtggccttctaaactgtgtaattaagagatttaactttgagcctacatggtctaggttttttaaaaaactgacttcaagtatataactgaaaatatagtcacttagaatcttgtaactcaagaactacattgttttatcctgtaagaatgcaataatatccaaaatacactaatttgattaatatcaaaaacctatactttatttaaatgttatagcaacttaccaattctatgtacttaatgagttttaggtaaaaagagtggatttctttaaagacatcttcaaaaaaaaaaatgtagagtcatcccataggctaaaagtttcttacttcttaatttgctttggctgctataacaaaataccatagactgggtagcttaaacatcagacatttatttctttgaattccagggcctggaaagtctgagatcaaagttctggcagggattggtttctagtgaggtttcttcttggcttgcagatggccatcttcttgctgtgtcctcacatgggagagagagattgctctaatgtctcttcctcttataagggcactagccttgtcacattagagttccacccttataacctaatttaacttttatcacctcctcacaaggccctatctccaaatacagtcatattgggggttaaggcttcattatataaattttgggtaaggggtcactgacatttagcccataacagacacattccatccagatcactgacagtgatagcaaaaggtattttgtaaaaaaggaaaattcttcctggaagttagtgacaaaagtttaggaatcctcagcatgtcccttggcttatcttgacaattaatgctcatcatttatttaaatgcttttttgaagtaatttatatttcagcctataattccttttgaagaaattaaatttacagatttactacccacctgttgagatagtatttccttttcttgttctaagagttccttaatataagcttaaagatagtctgctgctgggcatggtggctcatgcctgtaatcccagcactttgggaggccgagttgggtggatcaccaggtcaggagatcaagacaatcctggctaacacagcgaaaccctgtctctactaaatatacaaaaaattagctgggcgtattggcgggcgcctgtattcccagctactggggaggctgaggcaggagaatggtgtgaacccagggggcggagcttgcagtgagccgagatcgtgccactgcactccaacctgggtgacagagcgagacttcgtctcaaaaaaaaaaaaaaaaaaaaaaaaaaaagacagtctgctaattccagctactagaattttctatataattataaaatttatttgtaatttgccttgaaaacttggtatttccatcctaatgtgatgtgtcatttagggtaattttgggagtgtggagatgtgccggtatgaccctctacaggacaacactggggaggtggtcgctgtaaaaaagcttcagcatagtactgaagagcacctaagagactttgaaagggaaattgaaatcctgaaatccctacagcatgacaacattgtaaagtacaagggagtgtgctacagtgctggtaagctgcccattgaaacctattttaaattcaaggtatgtgtttggcatcctgtgtaatataaatgtacaatgtcttaacgatctggacttatgccaatgcccagagggagaggcattctataatgactagagattgtgtttggtgatcatagactataactataggaagtatttggctagttggttaaacattcttttcacctcttgcttaagcttaccaagaaagtatcatttttaaaggaattgtttttgtttacattttctataaaaatatttttgaattcaatgttttttgttcgatatcaatgaggagaaaggaagttttctcatcagtttattttggtttgcctgaagagttatagaaaactgaaacgcaaatagtttcaaagcttttattcattcaaaagtttttgattcaaaaagactatgttcttaacaactatatcacctttaatgtataataaagttttgtcatcttagatttcatatatgtttaagtcatttatgtatgatagttttctaatatttaatcagtataatatggcagagtaaaacattatttccacctttatgttaaaaggtcggcgtaatctaaaattaattatggaatatttaccatatggaagtttacgagactatcttcaaaaacataaagaacggatagatcacataaaacttctgcagtacacatctcagatatgcaaggtaactaatatcctgattatttgctgtagatgaagcaaccgtgttgaagtagacattaggaaatcatctagacgttttcatagataataaagggaatatatagggttaagaccatttaaattgtttatatttataaaactagctgaaagaaaaatgttttatccatagggtatggagtatcttggtacaaaaaggtatatccacagggatctggcaacgagaaatatattggtggagaacgagaacagagttaaaattggagattttgggttaaccaaagtcttgccacaagacaaagaatactataaagtaaaagaacctggtgaaagtcccatattctggtgagtatatttcagtatgataaatgaaattttagagcacagacttcaaactttattgttgttatttaatagtttgccatttctatatttacagtaacagtgaacatttaagtcttttaagtcttacatttaactttttttttttaggtcttatagtcatggttatagtccacgtgggaaaatggcatatgctttatttctattaagtgttgtcttatttatagggattgtaggtttttcttcaaaactgtctcctatttattgaggcttaggggtaattattagtggtgctgtgggttgtggtattgtgttgaattttggtggggctttcatggggttaatagtcttttttatttacttgggtggtataatggttatttttggttatactccagtgatagctattgaggagtatcctgaaacatgagggccaagtactgatatttgaggggccttattattaggattattaatagagttgatactggtttggtgaatagttgaatatgatggggtggtgatcacggttgattttaatagcatagggagttgatttaatttttgagggggaggggttgattcatgaggattttgtaggtgcagctgccttgtataattatgggtgttggttggtggttgctggttgatcattgttagtatttttgtcgcaattgaaattactcagggtaatagattagataattaatagtagagtttaggcctttttggtcagatacagtaatggaggctgaagtttgggttcgtgaaatggtttttggtatagacttttctagtcaaactgggtctagtagaagtgaagctagattttggcttatgaataggcttaagtcggggggctgaatggtgaattgtagctgaataaaaacctagtatactggagaagttaaatgtctataatgggtactttaaggttgttagttatgaaattaagctctattgctagtaagagacctagggtggttacacctagggctgtgagctttaggtggagtggtatagttgtttggggggatgaagtagggataatactgttagtgatgaggaatccggcgaagatactgccgattgctaggtgctgaactgagttaattcggagaggattatcattaataacaatcagaattgtaaaacaaggttgtcctattacagcacctaaggttataaagtaagcacaagtaaatacataaaaacgttaggtcaacgtgtagctcatgaggtggcaagaaatgggccacattttctaccccagaaaatctcacgacaacctttatgaaatctaagggctcaaggaggatttagcagtaaaccaagagtagagtgcttggttgaggttgaataaggccacgaagcacgcacacactgcctgtcaccctccgcaaatatcattctagaaatattatttaaattctctatacatgaatagaggagataagtcgtaatatggtaagtgtactggaaagtgctcttggacaaacaaagtgtcgcttaacccaaagcatccagcttacacccggaagatttcatcacaacctggtcactttgagccaaccctagccccaaacctcactaaaaatactattaaaccatcgtaatcaaaccatttaccttagacaaaagaataggcaatagaaattcttatcttggcacaatagatacagtaccgtaagggaaagatgaaagaactgagcaaagacaagcccttataccttctgcataaagtattaagtagaaataactttacacagagatagccaagtcccccgaaaccaaatgagctatgcaagaatggctgaaagagcgtactcacctacgtggcaaaatagtgggaagattcatgagtagtggtgataagcctatcaagcctgctgatagctggttgtccaagatagaatcttagttcagctttaaacttacccacagaattacttaatgtccctgtaagtttaactgttaatctaaagagggacagctctttagaccctaggaaccaaccttcctacagagagtacaaaataacatcgccatagttggcccaaaagcagccaacaattaagaaagtgttcaagctcaacatccaagtatcttaaattctaatcactctacggaactcctaacattacactggtctaatctattatttaatagaagcaataatgttaatataaataacatgaaaatattctccaccgcataagcttacataagactggaataacccactgactgacagttaacagctagatattttacaataagcatcctattatttatactgttaatccaacacaggcatgctctaaggaaatattacaaaaagtaaaaggaactcggcaaatcttaccccacctgtttaccaaaaacatcacctctagcattaccagtattagaggcactgcctgcccagtgacatatgttcaacgaccaccatatcctgaccttgcaaaggtaacataatcacttgttccctaaatagggacttagaagaatggccacatgagggttcagctgtcatgagggttcagctgtctcttacgtttaatcagtagaatctgacctattggtgaagaggagcttataagcaaataagatgagaagaccccatggcactttaattcattaatgcaaataaaaactcaaaaagcctataggccttaacctactatctctgcattaaaaattttggttggggtgacctcatagcatattcaacctccgaacaacctaaactaagaccacagtagtctaagcgagttaatacacattgacccaataatttgatcaacagaacaagttaccctagggataacagtgcaatcctattctatcatatcaataatagggtttacgacctcgatgttggatcaggacatcctaatggtgtagccgctattaagggttcatttattcaatgattaaagtcctatgtgatctgatttcagaccagagtaatccaggttggtttctatctgtttaacatttctcctagtatgaaaggacaagagaaatacggcccacttcataaagtgccctccccccataaatgatgctatctcaatctaggaaatcaccacacacccaagaacagggtttcttaagatggcggagcctggcaatagcataaaacgtaaaactttacaatcaaaggttcaactccccttcttaacaatatgcctataattaaccttttcctacttatattcccactctaattgctatagcattccttacacttaacagttacgcaaaggacctgataccgtaggcccctgtggactgcttcaaccatttgctgacccaataaaacttttcaccagagaacccttacgaccctcaacgtctactgttaccctttatatcattgcctccaaccctggccctttctatcaccctcctcttctggactccccttcctataccccatcccctaattaattttaatataggcctcttatttattctagccacatcaagcctagcagtctattccattctatgatcaggataagcatccaattcaaattatgtactgatcggcacactacgagctgtggcccagacaatttcatatgaagtcaccctagccattatcctgctatcactactactgctaagtggctcaacttatatgcatgcatcacaatgccagaattactctgaccgctcctaccatcatgacccttagccatattatgatttatttccacactagcaaaaactaaccgagccccttttgacttaacagaaagagaatcagaactagtttcaggcttcaatgtcgaatatgctgcaagttcatttgccctcttctttatagcagaatatatgaatattattgtataaatgccctgactactactatttttctaggagtactacacactatgtattcaccagaactctgtaccataaatttcattaccaagaccctccttttaaccaccgtttttatgaatccgaacagcatacctccaattccactacaaccaactcatataccttttatgaaaaaatttcctaccacttacattagcattctgcatatatctcaatgcctttcctaatttccagcattccaccccaaacataggaaatatgtctgacaaaagaattactttgatagagtaaacaagagaggttaaaatcctcttatttctggaactataggaattgaacctatccctgagactccaaaattctccatgctacctattaaaccatatcctaaagtaagttcagctaaataagctattgggcccattctcctgaaaatgttggttatacccttcccatactaattaatccattagctcaacttattatctctcttactattttcacaggaaccctcatcacaatgctacgctcacactgatttcttatctgaacaggcctaggaataaatatagtagttcttacccccatcttgattaaaaaaacaaatctccactctacagaagcagccaccaaatattttcttacacaagcaactgcatctataattctcatgatgggtatccttttcaacaacccgtcctccgggcaatggacaataataaacactactaatcaattttcatccttaataataacagccctagtaataaagctagaaatagccccctttcacttccgagtcccagaagtaacccagggaacttctctaatgtctggcatacttctcctcacatgacaaaaactagcccctatctcaattatatttcaaattttcccatcaataaacacgaccagtctcctatctatcacaatcctatccattaacgtaagcggttgaggaggacttaatcaaacacaattctgcaaaatcttaacctactcctcaattactcatataggttgaatgatcccagtactaacttataatccaaacgttaccattataaatctgattgtttaccttattttaacaactaccacatttctagcacttagcctaagtataagcactacaaccctgtcactgtctcacacttgaaacaaattaacatgattaacacctatagtttcactaattctactatccctaggagctttacctccattaacaggatttctgcctgaatgagtcatcattcaagaattttcaaaaaacaatagtcttattaccccaaccattatagctatcataacactactcaacctgtagttttatatatgcctaatttactccatctcaatgacaatattccccacatccaataatacgaaaataaaatgacaattcaaaaacacaaaacccatattactcctccctccacttatttcttctaccttcctcttacccatctctccactgattctagttataacttagaaatttaggttaaataagaccagggaccttcaaaacccttagtaaatgaattatacttaatttctgtaacaaacccaaggactgcaaaactctattctgcatcagttgaacgcaaatcaaccactttaattaagctaagtccttgctagatcggtggaattcaaacccacaaaaatttagttaacagctaaataccctaatcaactggcttcaatctacttctccctccatgtggggggagggtggtaggccggagaagccctggcagcattgaagctgctcctttgaatttgcaattcaacataaaaaattacctcagggctggtaaaaagaggtcttgacctctgtctttagatttacagtccaatgcttactcagccattttacccttttttccacttatgttcatcaattgttgattgttttcaaccaatcacaaagctatcggaacactatacctgctgttcggcgcatgagtggggatagtgggtacctccttaagccttctaatttgagcagaattaggtcaaccaggaactctgctaggagatgaccagatctataatgttattgttaccgcccacgaatttgtcataatcttctttatggtcatatcaattataattgggggtttcggcaactaactagtccctctgataattgctgcccctgatatggcatttccacggataaataataatgagctttttacttctcccccactctttcctactcctacttgcatcctcaatagaagccggtgctggaactggctgaacagtttatccccctttagctgaaaacctaacacatgcaggatcctttgtgggtcttaccatcttctcacttcacttggcaggtattctattttaggagccattaactttattactacaattattaacaaaaagcccccagccatatcccaatatcaaacaccccttttcgtccaaccattcctcattacagcaatcctactcctttctctctcagtcctagccgctggcattaccacaatattaactgaccgtaacctcaacactactttttgaccctgctggtgggggtgatcctatcttatatcaacatttattctgattctttggtcaccctgaagtttatatccttattctatcaggctttgggatgatctcccatgtcgtgacgtattactctggaaaaaaggagccatttgggtatatgggcatagtatgagccataatatctattggcttcttagggtttattgtatgagcacaccatatatttacagtaggaacagacatagacacagacacatgagcatacttcacctccgctaccataattactgctatgcctactggcatcaaggtctttagctgattagctacactgcgtggtggtaacatcaaatgatctcccgcaatgttctgagccctaggattcatctttcttttcacagtaggaggtctaattggcattgtactagctaattcatcactagatattattttacatgatacatactatgttgtagctcatttccactacgtcctatcaccaggagcggtgttcgccatcataggaggctttaccactggttcccccattctcaggttatatgcttaatcagacctacgctaaaattcacttcaccattatattcataggtgttaatttaacctttttcccacagcacttccttggcctatccggtatgccgcaacgttattccgattatcctgatgcatacaccgcatgaaatattatctcatccttaggctcatttatctcattagcagcagttatgctaacaatttttataatctgagaagcctttgtttcgaaaagaaaaactataacaattgaacaaccatctagtaatttagagtgactttatggctgtccaccaccttaccacacatttgaagagccaacctacattaaacccttaaatgaaaaagaaaggaattaacttccagaaactggtttcaagccaatcaaaaacctctgtgactttctcgataagatattagcaaattcattacgtaactttgtcaaagttaagttataggctaaatcctatatgtcttaatggctcatccagttcaattaggccttcaagacgctacatcccctatcatagaagaaccgctcactttccgtgaccacgttcttataattattttcctaattagttcctggttctatacattatttccgtaatactcacaacaaaattaactcatattagcaccacagatgcccaagaaattgagactgtttgaactatcttacctgccattatcttaattttaaggcctctcatccctacgtattctgtataaaacagatgaagttaataatccttcccttactgtcaaagcaattggtcatcaatgatattgaagctatgaatatatagactatgaagaattaagcttcaattccttttttttttttttgagacagagtctcgctctgtcgcccaggctgcagtgcagtggtgtgatctcagctcactgcaagctctgcctcccgggttcacgccattctcctgcctcagcctcccgagtagctgggactacaggcgaccgccaccatgcctgggtaatttttttgtatttttagtagagacggggtttcaccatgttagccaggatggtcttcatctcctgacgttgtgttccacccacttcagcctcccaaagtgctgggattacaggcgtgtgagccactgcgcccggcttaagcttcaattcttatataaccccaacaccagacttaaaaccaggagaacttcgactccttgaagttgataaccgaacaattctcccaacagaaatacccatccatatattaatctcatctgaagacatcctgcactcatgaactatccccttattaggcctcaaaacagatgcaatccccagatgcttaaatcaaactaccttaaccactgggcgaccaggtctttactatggacagtgctcagaaatttgtgaatctaaccagttttatacctattgtcctagaactaatcctcttaaaatatttcaaaacctgatccacatctacactaaaatatcactgtaaagctattcagcatttaccttttaagttaaagattgacggagtctacacctctctgcagtgaatgcctcaactagatacttccacatgatccattattatcctgtcaataatcataactttattctccattattcagttaaaattattaaatttcatttatattatccctacaccaaaaataatcaaaacacaaaaacacaaggcttcctgagaattaaaatgaacgaaatctattcatctcttttgctacccctacaattctaggcctaccagcagtagtattaatcattctgtttcccactgtttccaacctctagtcatcaaattagtaaccgattattttctattcaacgatgattaatccaacctgcactaaaacagataataattacccataacattaaaggacaaacctgatcccttataataatatccctaattatcttcactgcctcaaccaacctccttgggcttctaccccattcatttacaccaactatccaattatcaataaacctgggtatagcaatccccctgtgagcaggcgcagtaattacagtcttctgctttaaaacgaaaaactccttggctggctttttaccacaaggcacacctatgccacttatccctatactagtaatcattgaaaccattagcctatttattcaaccaatagcattagctgtgcaattaacagccaacattatagtcagtcatctactaatacatttaattgcaggagacacactagtactattagctattagttttcccacagcttcagttgcttttattattctaatcctactgactattctcaaattcgccatagaccttattcaggcttatgtcttcacactactagtaagcctttatctatatgacaacacataatgacccaccaaacacatgcttgccatatagtcaaacccagcccctgaccactaacagaagctctctcagctctactaataacatctggcctggccatgtgatttcactttaattctactactcttttaaccctaggcctattaatcaacacactaactgtataccaatgatgatgtgatattatctgagaaagtaaatttcaaggccaccatacaacagttgtccaaaaaggcctccaatatggaataattctatttattatctgagaagtattcttctttgctggtttcttctgggcattctatcactctagtctagccccaatgccagaattaggaggacactgaccccccaacaggcatttttcccctcaaacgcttagaagtacctttctgaatacatctgtattatttgcatcaggagtttcagttacttcggctcatcacagcctgatagaaggaaatcgaaagcaaataattctagcactatccatcacgattaccttaggtatttacttcaccctcctacaaatctcagtactttgaggccccttttactatctctgatgggatctatggctcaacattctttacagccacaggctttcatggatttcatgttattactggatcaacatttctcactatctgcttcctccgccaattaaaatatcactttacaagatgtctgaataggaatagctccagtctgcagctcccagcatgatcgacgcagaagatggtgatttccgcatttccaactgaggtacctggttcatctcatcgggactggttggacagggggtgcagcccacagagggcaagttgaagcagggcggggcatcacctcacccaggaagcacaaggggtcaggggatttccctttcccagccaagggaagccatgacagactgtacctggaaaatcaggacacttttgcccaaatactgtgcttttccaacagtcttaccaaatggcacaccaggagattatatcccatgtctggcttggcaggtcccacacccacggagccctgctcactgctagcacagcagcctaagatccacccgtgaggcagcagcctggcaggcggaggggcgtccgccattgctgaggcttgagtaggtaaacaaagtggccagggaagctcgaactgggtggagcccaccacagctctgcaaggcctgctgcctttgtagaccacacctctgggggcagggcatagctgaaaaggcagcagaaacttctgcagacttaaacgtccctgtctgacagctctgaagagagcagtgtttctaccagcatggtgtttgagctctgacaatggacagactgcctcaggtggatccctgatgcttctgtagcctaagtgggagacacctcccagtagaggccaactgacacctcatacaggtgggtgcctgtctgggacgaagcttccagaggaaggatcaggcagcaacattggctgttctgcaatatttgctgttctgcagcctccactgcagataccgaggcaaacagagtctggagtggacctccagcaaactccaagagacctgcagctgagggacctgactgttagaaagaaaactaacaaacagaaaggaatagcatcaacatcaacaaaaagggcatccacaccaaaaccccatctgtaggttaccagcaccaaagaccaaaagtagataaaaccacaaagatggggagaaaccagagcagaaaagctgaaaattctaaaaaccagagggcctcttctcctccaaaggattgcagctccttgccagctggatggagaatgactttgacgagctgacagaagtaggcttcagaaggttggtaataacaaacttctccaagctaaaggaggatgttcaaacccatcgcaaggaagctaaaaaccttgaaaaaagattagaccaatggctaactacaataaacagtgtagagaagaccttaaatgacctgatggagctgaaaaccatggcatgagaactacaggacgcatgcacaagcttcactagccgacttgatcaagtggaagaaagggtatcagtgattgaagatcaaattaatgaaataaagcgagaggagaagtttagagaaaaaagagtaaaaagcaacaagataaagcctacaagaaatacaggactatgtgaaaagaccaaatctacatttgattgttgtacctgaaagtgacggggagaatggaaccaagctggaaaacactcttcaggatattatccaggagaacttccccgacctaccaaggcaggccaacattcaaattcaggaaatacagagaactccacaaagatactcctcgagaagagcaaccccaagacacgtaattgtcatattcaccaaggttgaaatgaaggaaaaaaatgttaagggcagccagagagaaatgtcgggttgcccacaaagggaagcccatcagactaacagcggatctctcagcagaaactctacaagccagaagagagtggaggccaatattcaacattcttagagaaaaagacttttcaacccagaatttcatatccagccacactaagcttcataagtgaaggagaaataaaatcctttacagacaagcaaatgctgagagattttgtcattaccaggcctgccttacaagatctcctgaaggaagcactaaacatggaaaggaacaaccagtagcagccactgcaaaaacataccaaattgtaaagaccatcgatgataggaagaaacagcatcaactaacgggcaaaataaccagctaacatcataataacaggttcaaattcacacataacaatattaaccttaaatgtaaatgggatgaatgccccaattaaaaaacacaaactggcaaattggataaagattgaagacccatcactgtgctgtattcaggagaccaatctcatgtgcagagaaacacatgggctcaaaataaagggatggaggaagatctaccaagcaaagggaaagcaaaaaaaaaaaaaaaaaaaaaaaaaaaaaaaaaagcaggagttgcaatcccggtctctgaaaaaaaagactttaagccaacaaagatcaaaagagacaaaaaaggccattacataatggtaaaaggatcaactgggcaagaagagctaactatactaaatatataggtacccaatacagcagcaccaagattcataaagcaagtccttagagacctataaagagacttagactcccacacaataataatgggagactttaacacctctctgtcaataatagacagatcaatgagacagaaggttaacaaggatatccaggacatgaactcagctctgcaccatgtgaacctaatagacatctacagaaccctccaccccaaatcaacagaatatacattcttctcagcacgacatcacacttattccaaaatagaccacatagaagtaaagcacttctcaccaaacgtaaaagaacagatatcacaacaaactggctctcagagcacagtgcaatcaaattagaactcaggactaagaaactcactcaaaaccgcacaacttcatggaaattgaacaacctgctcctgaatgactactgggtaaataatgaaatgaagacagatataaagatgttctttgaaaccaacgagaacaaagacacagcataccagaatctctgggacatatttaaggcagtgtgtagagggaaatttatagcactaaatgcccacaagagaaagcaggaaagagctaaaatcgacaccttaacatcacaattaaaagaactacagaagcaagagcaaacaaattcaaaagctagcagaaggcaagaaataactaagatcagagcagaactgaaggagatagagacacaactcttcaaaaaatcaatgaatccaggagctggtttttcaaaaagatcaacaaaatagatacactgctagcaagactaataaagaagaaaagagagaagaatcaaatagagggaataaaaaatggtaaaggggatatcaccaccgatcccacagaaatacaaactaccatcagagaatactattaacacctctacacaaataaactagaaaatctagaagaaatggataaattcctggacacatacaccctcccaagactaaaccaggaagaagttgaatctctgaatagaccaataacaggctctgaaattgaggcaataatagcctaccaaccaaaaaaagtccaggaccagatggactcacagccgaattctcctagaggtacaaagaggagctgataccattccttctgaaactattccaatcaatggaaaaagagggaatcctccctaactcattttatgaggccagcatcagcccgataccaaagcctagcagagacaccacaaaaaaataattttagaccaatatccctgatgaacgtcgatgtgaaaatcctcaataaaatactggcaaacccaatccagcagcacatccaaaagcttatcaaccacgatcaagtcggcttcatccctaggatgcaaggctggttcaacatttgcaaatcaataaacgtaatccataacataaacagaaccaatgacaaaaaccacatgattatttcaatagatgcacaaaaggtctttgacaaaattctacagcccttcatgccaaaaactctcaataaactaggtattgatggaatgtatctcaaaataataagagctgtttatgacaaactcacagccaatatcatactgaatgggcaaaaactggaagcattccctttgaaaactggcaaaagacaaggatgccctctgtcaccattcctattcaacactgtgttagaagttctggccagggcaatcaggcaagagaaagaaataaagggtattcaattaggaaaagaggaagtcaaattgtccctgtttgcagatgacacgactgtatatttagaaaacttggtcatctcagccccaaatctccttaggctggtaagcaacttcagcaaagtctcaggatacaaaatcaatgtgcaaaaatcacaagcattcctatacacccataacagacaaacatacagccaaatcatgagtgaactattcacaattgctacaaagagaataaaatacctgggaatccaacttacaagagatgcgaaggacctctggacctcttcaaggaaaactacaaaccactgctcaatgaaatacaagaggacacaaacaaatggaagaacattccatgctcatggataggaagaatcaatatcgtgaaaatggcgatactgcccaaagtaatttatagattcaatgccatccccatcaagctaccaatgacttttttcatagaactggaaacaactactttcaagttcatatggaaccaaaaaagagcctgcattgccaagaccatcctaagccaaaagaacaaagctggaggcatcacactacgtaacttcaaactatactacaaggctaccgtaaccaaaacaacatggtactgctacccaaacagagatagaccaatggaacagaacagaggcctcagaaataacaccacacatctacaaccatctgatctttgacaaacctgacaaaaacaagaaatgggaaaaggattccttatttaataaatggtgctgggaaaactggctagccatatgtagaaagctgaaactggatcccttccttacaccttatagaaaaattaattcaagatggattaaagacttaaatgttagacttaaaaccataaaagccctagaagaaagcctaggcaataccattcaggacataggtgtgggcaaggacttcatgatgaaaacgccagaaacaaaggcaaccaaagccaaaacagacagatgggatctaattcaactaaacagctgcacagcaaaacaaactaccattagagtggacaggcaacctacagaatgggagaaaatttttgcaatctacccatcagacaaagggctaatatccaaaatctacaaagaaatttacaagaaaaaaacaaccccatcaaaaagtgggcaaaggatatgaacagacacttctcaaaagaaggcatttatgcagccaacagacatataaaaaatgcttatcatcactggtcatcagagaaatggaaatcaaaaccacaatgagataccatctcatgccagttagaatggtgatcattaaaaagacaggaaacaacagatgctggagaagatgtggcgaaataggaacactttcacactgttggtgggagtagtgtaaactagttcaaccactgcagaagacagtgtggcgactcctcaaggatctagaactagaaataccatttgacccagccatcccattactgggtatacacccaaaggattataaatcatgctgctataaagacacatgcccatgtatgtttactgtggcactattcacaatagcaaagacttggaaccaacccaaatgcccatcaatgatagactggataagaaaatatgccacaaatatcccaaggaatactatgcagccataaacaagggtgagttcatgtcctttgcagggacatggatgaagctggaaaccatcattctcagcaaactagcgcaaggacagaaaagcaaacactgcatgttctcactcataggtgggagttgaacaatgagaacacttggacacatggcagggaacatcacacaaaggggcccgggggagggatagcattaggagaaatacctaatgtaaatgacgagttaatgggtgctgcaaatcaacatggcacatgtatatctatgtaacaaacctgcacattgtgcacatgtaccctagaacttaaagtataataaaaatatatatacatcactttacatccaaccagcactttggctttgaagccactgcctgatgttgacactttgtagatgtagtatgactattcttatatgtctctatctactgatgaggatcctactcttttagtataaagagtaccattgacttccaatcaactagtttcgataatatctgaaagatattaaataacctgacactagccttagtaaccgacaccttactggccctactactactactaattacatttttacttccacaaattaatatttatatagataaatccagcccctatgaaggcagatttgacccaataacctccaactgcctccccttttccataaaattcttcctagtagccaacacatttctcctcttagacttagaaatcgctctaatactacccctgccatgagctattcaaacaaattacctaacaacaataatcaccacagcccttatactagttatcattttaatcctaggcttaatttacaaaagaactcaaaaagggttagattgaattgaattggtaaatagtttaagtcaaaagaaatgatttcgattcattagattataataaaccatatttaccaaatgccctctatttacatcaacattatattaccatataccatatcactactggtaaaattaatctatcaaacccacctaatatcatccctatgtgcctagaaggcataatactgtcaatatttatcataattacccttataactttaaatatacattttactctagcatctataatacccattatcctcctagtatttgctgcctgtgaagccgcagtgggccttgccttattagtttcaatctccaacacatacggcctagattacacacaaaatctaaatttacttcagtgctaaaaattattccgacaattatgctgttaccaataatatgattctctaaaaattctataatctgaattaacatgaccatccacagcctacttatcagcctcatcaccctattgttttttaaccaattcaacagtaactcatccaacttctcactagttttctcttctgatctgctgatgtcacccctcctaattttaacagcctattaccttttataatcctagcaagccaatattaactgttcaatgaatcacccccacaaaaaagctctatatttctatattgatttccctgcagattttttaaaattatagcattcacagccacagaactaattatattttatattttctttgaagccacactaattcctaccctaattattattatcacccgctgagggaaccaaccagaacgcctcaatgcaagctcatatttcctattgtacacactagtagggtcccttcctctacttgttacacttgtctacactttaaatacttcagattctctaaatatgctagtaatgatatttactgaccaagaactgttagcctccttatccaataatcttatatgactagcatgtattatggcctttatagtaaaaataactctattcggacttcacctgtgactcccaaaagcccatgtagaagcccctattgccggctcaacagtacttgcagcggtactcctaaaactaggcggctgcggtataatacggcttacccttatcctcagccccctaacagaatatatagcctaccccttcctcacactatccctatgagggatagttatgacaagctccatttgtctacaaaccgatgtaaaatcagttattgcctactcctctgtaagccatataccacttgtcatcatagctctcctaatccaaaccccttgaagctttacaggtgccgtcacccttataattacccatggagtcacttcatccctgttattctgcctagcaaattccaactacgagtgagtccaaaacggaatcatatacttacctgaggccttcaaatactcctcccactgatatagcctcatgatgacttctagcaaatctcactaatcttgccttacccctaccattaatctagtaagggaactctctgtgatcatggcttcattctcctgatcaaacatcactattatgcttacaggacttaatatactaattacaaccctctactccctacatgtaccaatcacaacacaatgagggacacttacatattacattaacagttaaaccttcctttacacgagaaaatacattaatatttatacatgttacacctattcttctattatcctaaatcctaaaattattatgggctttacatgctgtagctatagtttaaccaaaacattaaattgtggatctaataatagaagcctgcaacttcttatctaccaagaaagtatgcaagaactgctaactcatgcccccatgcctaacaatatggctttctcaacttttaaaggattggagtcatccgttggccttaggaaccaaaaacattggtgcaactccaaagaaaagtaacaaatatgtatttttccactactataatagccctaatcgccttaatcacaccaattattacgttagtcaacccctgcaaaagaagattcatacccaaattacataaaaatagccatcacatgcgccttcaccattagcctcatcccaacgtttatatatacagaccaagaagtcattatctcaaactgacattgaatgacaatcccaactcttaaactctcactaagctttagactacttctccataatatttattctagtagcactatttgttacctgtagaattctcaatatgatatataaactcagaccctaacattaatcaatttttcaaatattttcctcatcacagtattcttccaatattccaccaacaaactctttcaactctttatcggatgagaaggtataggaatcatgtctttcttactaactggctgacaatatggccgagcagatgctaatacagcagccctccaagcagtcctgcacaatcgcatcggcgacattggttttattttagttatagcatggttcctcttttcctccaacacatgagagattcaacaagcattcattctaaaccctacctctaatccccttccattaattcgccttctcttagcagcagcaggaaagtcagctaaattcggcctccatccctgacttccatccgccatagaaggcccaaccccagcctcagccctgctccactccagcactatagttgtagcaggagttttcctgctcatccgcttctaccctttaatagaaaataacctctgaacccaaacctttacattatctccaggggctgttaccaccttatttacagcaatctgcgctctaacacaaaatgatatttaaaaaatcatagcattctccacctcaagtcagctgggccttacgatagtcacaattggcattaatcagccacatctagcattccttcacatgtgcacccacaccttttttaaagctatattatttatatgctcaggctccatcatccacaatctcaatgatgaacaagatatttgaaaaataggactattcaagactttacccttcacttcctcttcccttattattggtagccttgcacttacagatatgcctttcttcacaggcttttactctaaagaccttattatcgaaaccacaaatactgtcatataccaacgcctgagccctttctattactcttactgccacctccttaactgctggctatagtacccgtgttattttctttgctctgcggactggccatgcaggagtggtaagggcccgggccacgcgcgacgcctgggggccctgctgcatcgcccgtttgttcggggaaggtgggggggacgcttcatgccgccgcgcccagcagggtttccatgtctgagatgcccgctctggccccaagagaatgaaccagccgcagaggatggcatccgtggacacggacaaggagctcagtaacctggacttcagcatgatgttcccgctgcccgttgccaacgggaagggccggcccgcctccctggccggggcgcaattcagaggttcaggtcttgagaactggcccagctcaggctcctggggcagcggcgaccagaacagctcctcctttgaccccagctggacgttcagcgaaggcgctcaacttgctgagtcgcacggcagccactctccattcacattcctgggaccgggactcggaggcaagagcagctagcgcgggcctattcctcctttggtagagacgcaggcgtgcgcagcctgactcaggctggcttcctgccgggcaagctggccctcagcagccccggacccctgtccccctcaggcatgaaggggacctcccggtactacccctcctacgccagcagctctggcggacagaggcggacagcggcctggacacgcagcccacgaaggtcgggaaggtcccgcctggtcttccatcctcggcgtacctgcccagctcaggtgaggagtacggtagggatgccgccgcctatccatccgccaagacgcccagcagcgcctgtcccgcccccttctacatggcagatggcagcctgcacccctaagccgagctctggagttccctgggccaggtgggctttggccccatgctgggcgggggctcatgcccctcgtccctcccgcccagcagcggccctgtgggcagtggcggaggcagcagcacgtttggcggcctgcaccagcacgagcgcgtgggctaccggctgcacggaggagaagtgaacggtgggcttccggctgcatccaccttctccttggcccccggagccacgtaggcggcgtctccagccacacgcctgtcggcggggccgacaacctcctgggctcccgagggaccacagccagcagctctggggacgccctcgggaaggcctggcctcaatctactctccggatcactcaagcaataacttgtggtccagcccctccaccgccgtgggctccccccagggcctgggagggacgtcgcactagcctggagcaggagtccctggtgccttatcacccagctacgacgggggtctccacggcctggagagtaagatagaagaccacctacctgaacgagggcatccacgtgctctgcagccacgccatgggcacggctagcaacgtgcacacgctgctacccggccaccgggcgctggccttgggcttcgccggccccatgctgctggtgggggcagcacgcaggcctggttggaggcgaacaccctgaggacggccctgcgggcagcgccagcctcatgcacatccatgttgccctctccagctagccaggcgccctccccgacctctcttggccttccgactcctgcagtgggctagggcgagcaggccactggggaaatcaagcgggaggaggaggatgaggagaacacgtcggcggctgaccactcaagaggagaagaaggagctgaaggacccccgggaccggaccagcccagacaaggacgaggaggaagatgaccttttccccccagagcagaaggccgagtgggagaagcaggtggccaataacgccagggagcggctgcgggtcccttaagagggctcttaaggagctggggcgcatgtggcaactgcacctcaacagcgagaagccccagaccaaactccttatcctgcaccaggccgtctcggtcatcctgaatttggagcagcaagtgcgagagcggaacctgaatcccaaaacagcctgtttgaaacggcgagaagagaaggtgtcgcgcgtgttcggaggcccccagatggtgctttcagctgcccacctgggcttgagtgaagcccacaaccccgctgggcacgtgtgaaaggtacgcctccgtgggacgagccacccgccctcagccccgtgggctgggcccagaacgcccacttgaggccctgggcttcatccacatccacacctcacacaactgttgtcagcattgagccaacaccgacctgatgaggctcagagtgatgggggcaaggaaggtgagtgatgggggtgaggaaggtgacgctgggtccaggagctccctgggaccccggctcacccctcactgccctcgctccccctgcccccgtatctcagccaccatgtcaccctgtgacctgccccatggaccctgaaactgcatcttggccctgttgtctgggctggcaggagcttttttttttttttttttttttttttttccagtaaacaaaacctgaatgcaagcaacaaaacatacactttgtcagaaaagaaaaaaatgccttaactataaaatgtggagaaatcgtaacatatcacttgagggagatgctgtggaaacttggcttattcttcaaaagccagcagcaaattgtgcctaagcgtaattttttttaaggaaaataaaaagaacattagttatttaaaaaaaaaaaaaaaaaaaaaaaaacccggactgaccttggccaggctggatcagactggcctagagtagacttcagagggtgactcccctggtgggctggtctcagctgatcttgactgtcccgcctccacacagggcccatccatcttccccttgatcccctgctgcaaagacattgcctctgatgccacctccatgaacctgggctgcctggccacaggctacttcctgaagtcagtgactgtgacctgggacacaggctccctcaacaggagcgctgggaccttcccagccaccaccctcacgccctctggccattacgccatcaccagccagctgactgcctcgggtgcgtgggccaaacgctcacctgcagcgtggcacacactctgtggtccgcagaccaggtcagtaccttcagcatctactccagggacttcaccctccccaccgtgaagatcttacagtcctcctgtgatggcagtggacacttacccccgaccatccagttcctgtgcctcatctctgggtacacccaggtgccatcagcatcacctggctggaggatgggcaggtcgtggatgtgaactggtccatcgcctctcccatactggaggatgagctggcctccacacaaagcaagctcaccctcacccagaagcgctggctgcccgaccacacctacacctgccaggtcacctatcaaggtaacacctttgaggacagtgccaagaagtgtgcagattctaacccgcaaggggtgagcacctacctgagccggtccagccccttctacctgttcatccgcaagttgcccacaatcacctgtctggtggtggacctggcacccagcaaggagaacgtgaagctgacttggtcccaggccagtgggaagtctgtggctcaggtcatcctaaggcaagagaagcagtgcaatggcacgttcaccatcacgtccaccctgctggtgggcaccagagactggatcaagggggagacctaccagtgcagggtgacccacacccacctgcagtccacgaccaagatcagcggcccatgtgctcccccacaggtctacgtgtttgcaacgctagaagagccgaggaaccaggacaagcgcaccctcacctgcctgatccagaacttctggcccaaggacatcttggtgcagtggctgtacaacgaggtgcagctcccggacacttggcacagcatgacgcagccccgcaaaaccaagggctctggcgtcttagtcttcagctgcctggaggttaccagggctgaatgggaacagaaaaacgagttcatctgctctgtggtccatgagacagcgactggctcacagaccgtcaagtaactgttgtctgtaaatcccattaaatgtcctcctgccttcctccccactagggctctgtccagctgtgtggtgggaagggctggccagaccttctgtccactgttgcaatgaccccaggaagccacccccaataaacagtgcctgctcagaaaacaaacaaacaaacaaacaaacataaaaaccctagaggaaaacctaggcaataccattcaggacataggcatgggcaaggacttcatgactaaaacaccaaaagcaatggcaacaaaagccaaaatagacagatgggatctaattaaactaaacagctgcatagcaaaagaaactgatcagagtgaacaggctacctacagaatgggaaaaattttttgcaatctagccacctgacaaaaggctaatatcaagaatctacaaagaacttaaacaagttcacaagaaaaaaacaaccccatcaaaaagtgggtaaaggatatgaacagacacttctcaaaagaagacatttatgtggccaacaaacatatgaaaaaaagctcatcatcactggtcatcagagaaatgcaaatcaaaaccagagtgaggtaccatctcatgccagttagaatggcgatcattaaaaagtcaggcaacaacagatgctgaagaggatgtggaaaaacaggaatgcttttacattgttgatgggagtgtaaattagttcaaccattgtggaagacagtgtggcaattcctccaggatccagagttagaaataccatttcactgagcaattccattactgggtatatacccaaaggattataaatcattctactataaagacacatgcacatgtatgtttattgtggcacttttcacaatagcaaagacttggaaccaacccaaatgcccatcaatgatagactggataaagaaaatgtgacacatatacaccatggaatactatgcagccataaacaaggatgagttcatgtcctttgcagggacaaagatgaagctagaaaccataattctcagcaaacacaggaacagaaaaccatacaccacttgttctcgctgataagtgggagttgaacaatgacaacatatggacacagggaggggaacatcacacaccagggcctgttgttgggtggagggctaggggagggatagctttaagagaaatacctaatgtagttgatgggttgatgggtgcagcaaaccaccatgacacgtgtatacctacgttaacaaacctgcaccttctgcacatgtatcccaaaacttaaagtataataaaatttaaaaaaaaaacagtgaacatttattgtaggcttacattgggctaaatgcattttatggataatctcatttaatcctcataacaacccttggagaacatgtatgattattatctctattttaagcatggagaactgaatagcttacccaaggtggcatgactagtaaatcactggaccaggatttaaacccaaaaagtctgatcccagagttcatgcttataagccttcctaaccatgataatgctttaatctggcattaattgttctctaatttgggtaggtttgaaatttttcataataaatattaaaaatactttttgaggaaatgtcgtcatgataaacattagaactgcgttcatctaattacttttagggtatgagtgaaactaaaaagtaagactcatctaaaaataatcatctgttttggccatatccccagtgatacatgaatttaattgtttttattgttttcagaatgaaaaattaaagaggttaaataaaattagctggcaatcaaaaaatattagttatatgaagattcagagatttggttatacttaatgaatacaagctaataaatatttattaagactctactgtgctccaaatactatacagggaggtagggatatgaagataggcttagcatcagaaaaggactgtcccttagtagaaaggctgaactaaaaggaaaagtttgacgtgataggcaaattcaactgacaggtccactacccatagtcccttcaagagctcataattaggaaaagtcatatgtataatatggcactttcaataattaagtgcaataagtgtaagtgcaataattaaggtactgggaaaacataacagtacaaataattcagctgaagatttatgtaagataactaagatgacatttcaacgattggttgaattgacctctccctcatgaatgggattaaggcccttataagaggcttcatgcagcatttggctcctcttgcctttccactttcatccatgtgaggacacggcattcctctcctctaaaagatgtggcaacaaggctccccttggaagcagagagcagccctcaccacacacctgaacctgccagcacctttatcatggactcccaacctccagaagtatgagaaataaatttctgttctttataaattatccattgtcaggtactctgttatagcagcatacatggacgcccagtacatcatgttaatgagttcagaccttctttagtagacagtgcgtaaggtgggaaattagaggctttatccaggggaataacatggtgagattcatattttagaaagatagctctacttttgttatagaacagcagttctgaaagtgtggggactttagggtgtctgtgaagtaaaaaatattttcataataatggatgttatttgctcttttcactcattttttcataagtatagttttccagaggcaataagatatgttttctatttaaccaaacattgaagagacttgcaaaaatgtaaaacaatgtgactcttatcaaagtttattttggaaatagttgttttccataaaatacattacttatgttaacaggtaatggttttatcttaaataaattaataaatatttttatattttattagctttaatatttaatatggtaaatactggtagatataactcacagaaacaaaagttttttggcaacctcagtaatttttaagagtatacgaggaagcctgagatcaaaagctttgagaactactgacagaggggacgttgtattaatgagaggctaatagtagagaggcagctaattagattttatgaggatctaggccactggttttcaaaccttttaagtatatatgctcactaaaagaatttagaaaaaccacatcctcttacacatttttaaattgatagctaatttttttctttgtaagtagttataatgtattttctaaagtactgtaaatattgacatttaaataacagctatgtcaatcctttaaatgtgtccaactgaatctaaatagtgcttgcagtgagcggagacctcgccactgcactccagcctgggcgacagagcgagactccatctcaaacaaacaaataaatagtgcagcaatttgatacccacttatcacccacttaaaaagattatatgaatagacttttatttttttgtacaaactttgtatcattcctttttctctttaaaatagtattcccacttcccttctcattccaaattttgcataatatgttacactttgtatttggataatcttatgatcacctattttctttgtaaccaagatatgtatataagtaagttgaaattaattaaaaattttcctgtgaccaacaaacttgtaactattcacatttttcttctgggttatcattgaagttactaggatacagttttccaaagcaatgtaaataacaaatttggataattgctttaaaaattttattggtgaatggaacaatccctcccctccaattggtttgtatatcctcggatgaatattatttatttctataatgggacaagattaagcataaattctgtgttcattttgcactttacagatgtaaacgctgagaaaacttgtttgtgtaagtgagtggacaggaatggaaggagttttgttataatagtatcattcatttctatgacgccttctgagatatgcaggaaaaaagtacagtaatataccattaaaaattatctgttattgggcagtttcatttgatcagatccattatgtttcaattttattaaaagcagagaattaaaaccacttgactttcaaaaatgagtttactaaccagtcatcaggttcatctgttttctcaatttctgaaaagtataccaaaaagcttttaaaattaattccaactatatgttacactttcacgtggatgtaccttgtttaaactaatacattcagaaaagtttgaaaaaacagactattattaatacattattattaacatattttatcatgttttaaatatatgatttaaacacagcaaacctctcagctacctcaaaggttgagtagattttgtgaagaatgtccttcatacaacccatttggtaatgccaggcatcaaacaaatcacttaatttctggcagaaaaactcagacttcatttttcaagtcactaaatatattaataatatgtgatttttttaaaacctgagaaacaaatgacagaacaaatgcatggaggtatgtttattatgaagctaatgaagcatatccagaggtcctccttccaaggttcctttctaattttaaatagaaaattatgcactttcatgtataattttgtattctttgtcataatgaaagcctaaaaaaaaaaggcttcaaattatataagctttgggacctgtatctctgcctatacatgtgaaaaaatcatgagggcagtcaggataagctgaagatgatatatatatctggcataattaatttcatattatgaaaataagataatttctcattacttaatttgcaataaataatacagagtaaaatatggctaagattataacttatgaagtaaggtatatggtacatggcatggtcattccttcagtaaatgtgttagggggaggtatgaagtgaattctgactttggggaataattagaagcaacttgtatgaaaatcagaaataacttatttttcctcatgatcaaaattttcatatgtacttaatgaacacaaaaaatatatactgctaaaagcaaatcaggcagttagcatatagttttatttttatatttgcaagtagaaaataaatattttatacaatgaaatgaagttcattaaattttatgtaaatattttagaatatgaattgataaaataagtttgagctaacttattgaataataaacactgtcttagtccctttatgctgctataacagaatacctgaaaatggataatttataaagaacagaaatttatttctcacacttctagaggttaggagtccatgaaaaaagtgctggcaggttcaggcgtctggtgagagctgctctcttctttccaagatggagccttgctgcttcctccttcagagaggaggaacaccatgtcctcacatggacaaaagtggaagggcgagaggggccaaatgctgcatgaagcctctcataagggccttaatcctattcatgagggagaagccctcatggcgtaatcatctcttaaaggccccacctgttaataccatcacattaacaacacctgaattttggaggagacacatagcaaacactaaatctgaagtctgaaagaactcaatttttattcacaggattttgcccatgatatcatttttttaaaaactcaatttcatttaaaagaaactttgttatctatattgtttttcttgttcgaaaaggctcttttgttttaagctaacaatatggttgacggtaataactgggggaaaaagtgcctctgcttaaatgttgtaaaaaatcggtgaaacaggattttggactcctggaggatcctttactctttttactacagaagtacccattggatgatctttgtacattattcttcaccttgtgtgaagacctctgtgctagtcatgagataaggatgtgatgtaaactgtaacaatgggttaggagactgattggagatatttctaagctatactctaaagggacttagtgggtcattagacactggagtgaaagatgcgtcaaaaataattaagattttcaaattgagcagctaaatagattgtgatgctatttattgcataagaaacaaaataatcagcaagttttggaaagaggatggaattctgtttgcctatagatctttaatgtggaaatgttctaaaagtctggagcactaaacaaaggtcaaagatatggttataaatttgggagactttagtatataggtggatgatactatctaagggaaagtttttaaccaagagaggaataaatctgatgaagagaccctgggaaaccttcaatttagaagaggcagaatagtagtagtagtgttgggaaagtataattgaaaacaaaatcttccaacccagaaaacctttccacaaagatagaaggaaaacaattttatgattgagtaagcattagagcaggatgtgatgtgtatcacaagcagtcccctaagagatttgcaaagacagaaggaaatctcacccttttatatagccaacctgatataacccctttcattcaagttcttaggataaacattaactagtcctcaagtaagaagacttgacagcactatttgccacatacgtagtttattctaaattcacttggtaattggagtgactttgctaattggctttatacaaaggaaaatacacttttcatatcttcatgacaggaggtagttttgcagcttggaaggaggctcctgctgaagttaggcttctactcccacagaaactgggagtaagggtgctatcttccttgatgactgaattcccaagagatagttacacgttcttgagaaagacattcatgggtcacaaaactggcaagaggctttgaagcaagagatttttaaaagatttacatacacttcaaaaagacaaagaatttacaagttttctgaatgctctaagaacaaagaaggaggagtctttcttcttattttcaacaaggggaattaattttgttctttttaaatttgtatttacccttacataagtgatagaacagacagaaaaaaacagctgtggaaatgtgcgggaaattacaatgagtgctatatgaaaaccagaggaagagcatattttgcaaggagtgagggaatagtgctgtcttcaagaactttgcattccccttgtggaataaaactaacatacatttgataataacataactagatatgtaaaatttgtaaagactaaatgtaaaaagaatatagcattaggatgtttaattacgtagtatggactgccagtactataggaattcagtggcctgagggcaataagacctggagtaggcagggaaggatttgtggagattaggaaacttaaatgggattttgaaggagagattaaatctatgtaattcacatttttaatatcagtctaaaacacatctctgtagctgtctctataataaagataaacttagcaatggaaccatgatactcacagtccactaggccaaaacgttcccttggatagtgttaatgcttgagtgaacaatgacaccattgctgtgactttttcctttctgtattccttagtcacccctcttctggttaacaggttctttcttttatagctttaagtcttgccttggaaccaatttttttctccagcatatttatatggattcatttaaagcttaacttgcaaagagcagcttattttcacttcttagaaggtactctgcagttaaccttggtgctgtctacagagacaaaaataaatttctttggattttagttatctttctatgtcagagattcccaagaccatccccaggttgacgatttgctaggaagactcacaggactcagcatatatccatattcatggttatgattcattatagggaaataacataaagcaaaattaggcactctccgcctggcacatactaaagttacatactcccagaagaaaagtagatgtcagcataaaccgtattgtttgtacaaacaatctaggcatagtgagtcactcttatttagggaattgtggaatccctcctgaaatctaagttcacaggtgccaggcaaaaaggcccttttaatcatagaagcctcaggcctgctgtgataactcttttctctacatgtttttttttttaatttatacaatgatttgcaggtaaaatcaagagtccacatatcaagtaactgtcttttaaatgttattcatatatttacaggtatgctccagaatcactgacagagagcaagttttctgtggcctcagatgtttggagctttggagtggttctgtatgaacttttcacatacattgagaagagtaaaagtccaccagcggtcagtgtgctttttatttactttcagttttttgtttgttcgtttgatttttataaatttatggggtacaagtacaattttgctacatgcatacattgcatagtggtgaagtcagagcttttagggtatccaccaccttaataacatacattgtatcccttaaataatttctcagcatctactccaccaatggctcacccttccaagtctctattgtctatcattccacattctacgttcatgtgtatacattatatagctcccgcttataagtgaaaacgtggtatttgtctttctatggctgatttgtttcacttaagataattacctccatccatgttgctacaaaagacataatttcattcgttgttatggctgaatagtattccattttgtatgtataccacattttctttatccagtcatccactgatggacacttaggttgattccatgtctttgcttttgtgaagaatgctgcaataaacatacaggtggaggtatctttttgatacagtgatttcttgtcctttaggtagataccccatagtgggaatgctggatcgaatggtagttctatatttaggtctctgagaaatctttataatgttttccatagaggttgtacaaatgcacattctcaccaacagtgtataagagttcccttttctccacacccttgccaacatctgttattttttctctctctcatttttttttccattctgactggagtcagacatatctcactggggtaattttttctcttttttttttttgtcattctgactggaataaggcatatctcattgtgattttaatttgcatttctctggtgattagtgattagcattttttcatatgcctcttgtcagtttgggtgtcttcttttgaaaatgtctattgatctcctttgtccactttttaacacgattattagggggttttggttgaattgcttgagttccttataaattctggatggtagttccttgtcagatacaaagtttgcaaatattttctccgattatgcaggttttctgttcattctgttgattattgattttgctatgctgaaattttttagcttaataaagtctcatttgtctatttttggttttgttgcctatgcttttgaggtctttgccatgaattctttgtttacactcatttccattaaagttttctctaggttttttttctagtatttttctagtttcagatcttacatttaagtctgtaatcgatcgagttaatttttctatatggtgataaatatgggtccagtttcattcttctgcatatggcaatccaatttaccagcaccatttattgaaaagggtgtcctttcccatactgcgcaaagcaatctgcagattcaatgcagttcctatcaaaataccaatgtcatttgttcacagaattagaaaaaacaatcctaaaattcatagggaaccaaaaagagccctaatagcaaaagcgattctaagcaaaaagaacaaagctggaagcatcacattacttgacctcaaattatattataaggctacagtaaccaaagcagcatggtactcatataaaaaacaaacacatagatcaatggaacagaatagaaaacccagaaataaagccacaaatttatagccaactgatctttgacaaaatcaacaagaacatacattcaagtttttttttaacatgagaaaggatttatccaaagaatagtaagcctaggactcactttagagcttttattgcttatttttaaggcaatatcaaacaaaataatcccaaacctattcctaaactagcttgaatttttaaaaaggggatattgggaagctagttagtacagtctcttaatattacttttattaaatccagtaagctaattcattctaggaattattgcataagttaaaataaaccttccaaagtaatttttctcttggtcatcatagaattttttttaatatggaaaagtatgaaaaaataaaaatcatctctaatgcaattactcagagaagaccacctcaatattgtggtatgttacctttcaggcttcattttgtgtataaaagtatatacaaagaagtatataaaacttttataacttttataaaagttcacttatataaatatatattattttataaaattaaggtcatactgtgcagtttgctctccttctgtttcatgaagtattacagcatgggtaatttactgtattagaaaaatgtactgcaaatatgttttctaattgctgagtagcattccatcataaggctatatatgtctgaacaatcattttccattcttcagtcttttaagtaacacttcagtgaacatagtgaacatcctcatgcataaatatttatatttatctctgataattatcttagaataaaagtataagtaaaagttatgaactattttaaaatttttttaatttcaaaatgctttctagaaaagctgtgccaaattatatctcaacagcaatgcatagggatgtacatttcatcatttgccactattggttattatatttttatgtacttttgccaagttgataggggagaagttatatatattttaatttccatttcttttcttaatgtggttgactatatatttgttgggtgtttagggtgggtatgtatatatgtgaattatctcttctgtgctttgcctatctttatatttgtaattttttttcccaatttataagagctgtctatattgaaaataagtaaatgatgtttaagtattttcctagcttataattcagattttaattttataaactttgacatatgaaagttttctttgttgtatttatgcttattcattcattttttcttatattctcttttatattcaactttttatttcaattgaaatgtaatatgataaaaatatgagttttttaacaacaaaaaactcaaaggaaatatgtttttagttcatgtgttttgagccctcctcaggggatttgtgttgagtttattacagctatggaaatggaaattatagaagttccatatttaacagccttatgtttttgatcctaaaagtagtttgttttgaaaaggtttgaaaacatacaaaagcacacatatactaaattttttcccattgactggaggaaattgagaaagaattttgctacaaattaaatgtacaaaaaatattgaaagtgggtttgttttaggaatttatgcgtatgattggcaatgacaaacaaggacagatgatcgtgttccatttgatagaacttttgaagaataatggaagattaccaagaccagatggatgcccagatgaggtaacaatttttttttaatccagggtagtcatgcattttcttttactttttactcaaggacttcagttcacttcctgaaatttaatgtgcggagcttccagataaacagcataatcagatgactgtggaacaaggcatggttatgacatgtgccctgtattgaaaattaatgtcttccaccaattaaaagatggcccttagtgttcatttaattttggtttattttctcctttacagatctatatgatcatgacagaatgctggaacaataatgtaaatcaacgcccctcctttagggatctagctcttcgagtggatcaaataagggataacatggctggatgaaagaaatgaccttcattctgagaccaaagtagatttacagaacaaagttttatatttcacattgctgtggactattattacatatatcattattatataaatcatgatgctagccagcaaagatgtgaaaatatctgctcaaaactttcaaagtttagtaagtttttcttcatgaggccaccagtaaaagacattaatgagaattccttagcaaggattttgtaagaagtttcttaaacattgtcagttaacatcactcttgtctggcaaaagaaaaaaaatagactttttcaactcagctttttgagacctgaaaaaattattatgtaaattttgcaatgttaaagatgcacagaatatgtatgtatagtttttaccacagtggatgtataataccttggcatcttgtgtgatgttttacacacatgagggctggtgttcattaatactgttttctaatttttccatagttaatctataattaattacttcactatacaaacaaattaagatgttcagataattgaataagtacctttgtgtccttgttcatttatatcgctggccagcattataagcaggtgtatacttttagcttgtagttccatgtactgtaaatatttttcacataaagggaacaaatgtctagttttatttgtataggaaatttccctgaccctaaataatacattttgaaatgaaacaagcttacaaagatataatctattttattatggtttcccttgtatctatttgtggtgaatgtgttttttaaatggaactatctccaaatttttctaagactactatgaacagttttcttttaaaattttgagattaagaatgccaggaatattgtcatcctttgagctgctgactgccaataacattcttcgatctctgggatttatgctcatgaactaaatttaagcttaagccataaaatagattagattgttttttaaaaatggatagctcattaagaagtgcagcaggttaagaattttttcctaaagactgtatatttgaggggtttcagaattttgcattgcagtcatagaagagatttatttcctttttagaggggaaatgaggtaaataagtaaaaaagtatgcttgttaattttattcaagaatgccagtagaaaattcataacgtgtatctttaagaaaaatgagcatacatcttaaatcttttcaattaagtataaggggttgttcgttgttgtcatttgttatagtgctactccactttagacaccatagctaaaataaaatatggtgggttttgtgtgtgtgtgtgtgtgtgtgtgtgtgtgtgtgtgtgtgttatttatacaaaacttaaaatacttgctgttttgattaaaaagaaaatagtttcttactttatttttactggtatgttctacttttttgaaagttgtactgaagacttctgattttgggttgaagggaaggaaaaggaagaaatgttttttacattcattattatacttaaagcatttttaaagcattttaatagttctggatgcagaaatcatctaaaatgacagtgaattaggttttaaaaagattttagatttttttgaaagtttaatttttatttgtaaagactcctcaaggatttgtatatgcaacacagtaaggagatcttccattttactacctttcaagtgaaaaatagcctatcatacaatatgcttgatttcagattttcatactaaaacttaactacatacttaaaagtaggttcttatcaagggtctctaacattgctttttaaaacaagatgtgaactaacttttcttaaacatttttttaaatgcttcatcttttagttttatataaagaatcccacatgtacattcttgtttttagaatggggtgactaccttattataaaattccaagtttccaagagacttcttttcattgaggcttcgtaaagttttccattttgattctgactacacataaaaataagataaccctgtagttattaagttggttctgtacaagaaacaggtaagtaattattgtaccagttaatgccaaaatatttttcacgttaatattcttcagaaacaagggtaaaggtattcttagaattatgtaattctgtaactattccagtatattaagttatacaatctttatataaatgactttttccatgggtacttgtttggaaaatagtcactttttcacgctatttatatatgctgccagtaacactataatttgctatggaagagtgttcttttaacctaaggcttctagtttacagtcaagtgtaattttcatcacaactataacttctggtatttaaattttatttaaacagctacaaaagagttagcaaatacctacagttctgtatctatagagccaatcttgatggtgggtgtggcattatgtgctcactttattgagcctatgttaatttctttagcatgctccccctaaattgaaatagtgatgtagtaaatattcagaagcgattttcttttgcatttttacctaaccaaggaaacgggccacacaccttggtttagggatgttgtgatagcttaccttccagtttttaagaaatgcttcctacaactgctgtcaaccactgtattgtctttaatgaacactgttgtatcccatcctaattcttgtactgaaattatttctcatgaaagtttctctaatatttctaatgaaagtttctctaatttgggggcataatgtactaagaatcagtttgctgtatattagaataaatagtaacagtaagtcagcaggattatccaaacaaaagactaggttttatgagataagcttgatttaagaaaaaaacaattaaagtatgaatatcagaaatactgtgtgtttactctcagattttagttggttggatttaatatcaagataactagctgctaagcgtttcataattctcacagtgatattagatttcaaaatgacactgagagaactgaaaaactacatcagtcaaattcatgtatgtatatcatatagcctttaactttttacattaatcagattcttagtaaaatgcagactgtatacctaaatattaaaatatttacttttataatcttaccttttatttcaatataaataaaattcttcttaggttaaaaaattaatttcagttgtgtttatgccagatggcattgcttagttggtgcaagctctcaatatgtttcattcttttttatagtctttcacatttataaggaaaagccttatctccaactgaaacaccagtcttactactacggttttaaaagttgttaatgatcattatctattataaggcctttatttacatagcaaattgcttaacattttattttgaatataacagatttttaaaa

SEQ ID NO: 46 - DNA, 5386 bp, Homo sapiens
attcggggagactgcaggccaaccgggaggctgagttcgaagctagcagggcggcgaagccagtgtcgcccgcggcgttgagaagacggtgtggccccggagagggtggagacaactgtgacgggcttcccggctgcccgaagtgggagtggtgtggggctgcaggaaggagagaggaagaggagcagaagggggcagcagcggacgccgctaacggcctccctcggcgctgacaggctgggccggcgcccggctcgcttgggtgttcgcgtcgccacttcggcttctcggccggtcgggcccctcggcccgggcttgcggcgcgcgtcggggctgagggctgctgcggcgcagggagaggcctggtcctcgctgccgagggatgtgagtgggagctgagcccacactggagggcccccgagggcccagcctggaggtcgttcagagccgtgcccgtcccggggcttcgcagaccttgacccgccgggtttcagaagcaggcaacaggaacaagatgtgaactgtttctcttctgcagaaaaagaggctcttcctcctcctcccgcgacggcaaatgttctgaaaaagactctgcatgggaatggcctgccttacgatgacagaaatggagggaacatccacctcttctatatatcagaatggtgatatttctggaaatgccaattctatgaagcaaatagatccagttcttcaggtgtatctttaccattcccttgggaaatctgaggcagattatctgacctttccatctggggagtatgttgcagaagaaatctgtattgctgcttctaaagcttgtggtatcacacctgtgtatcataatatgtttgctttaatgagtgaaacagaaaggatctggtatccacccaaccatgtcttccatatagatgagtcaaccaggcataatgtactctacagaataagattttactttcctcgttggtattgcagtggcagcaacagagcctatcggcatggaatatctcgaggtgctgaagctcctcttcttgatgactttgtcatgtcttacctctttgctcagtggcggcatgattttgtgcacggatggataaaagtacctgtgactcatgaaacacaggaagaatgtcttgggatggcagtgttagatatgatgagaatagccaaagaaaacgatcaaaccccactggccatctataactctatcagctacaagacattcttaccaaaatgtattcgagcaaagatccaagactatcatattttgacaaggaagcgaataaggtacagatttcgcagatttattcagcaattcagccaatgcaaagccactgccagaaacttgaaacttaagtatcttataaatctggaaactctgcagtctgccttctacacagagaaatttgaagtaaaagaacctggaagtggtccttcaggtgaggagatttttgcaaccattataataactggaaacggtggaattcagtggtcaagagggaaacataaagaaagtgagacactgacagaacaggatttacagttatattgcgattttcctaatattattgatgtcagtattaagcaagcaaaccaagagggttcaaatgaaagccgagttgtaactatccataagcaagatggtaaaaatctggaaattgaacttagctcattaagggaagctttgtctttcgtgtcattaattgatggatattatagattaactgcagatgcacatcattacctctgtaaagaagtagcacctccagccgtgcttgaaaatatacaaagcaactgtcatggcccaatttcgatggattttgccattagtaaactgaagaaagcaggtaatcagactggactgtatgtacttcgatgcagtcctaaggactttaataaatattttttgacttttgctgtcgagcgagaaaatgtcattgaatataaacactgtttgattacaaaaaatgagaatgaagagtacaacctcagtgggacaaagaagaacttcagcagtcttaaagatcttttgaattgttaccagatggaaactgttcgctcagacaatataattttccagtttactaaatgctgtcccccaaagccaaaagataaatcaaaccttctagtcttcagaacgaatggtgtttctgatgtaccaacctcaccaacattacagaggcctactcatatgaaccaaatggtgtttcacaaaatcagaaatgaagatttgatatttaatgaaagccttggccaaggcacttttacaaagatttttaaaggcgtacgaagagaagtaggagactacggtcaactgcatgaaacagaagttcttttaaaagttctggataaagcacacagaaactattcagagtctttctttgaagcagcaagtatgatgagcaagctttctcacaagcatttggttttaaattatggagtatgtgtctgtggagacgagaatattctggttcaggagtttgtaaaatttggatcactagatacatatctgaaaaagaataaaaattgtataaatatattatggaaacttgaagttgctaaacagttggcatgggccatgcattttctagaagaaaacacccttattcatgggaatgtatgtgccaaaaatattctgcttatcagagaagaagacaggaagacaggaaatcctcctttcatcaaacttagtgatcctggcattagtattacagttttgccaaaggacattcttcaggagagaataccatgggtaccacctgaatgcattgaaaatcctaaaaatttaaatttggcaacagacaaatggagttttggtaccactttgtgggaaatctgcagtggaggagataaacctctaagtgctctggattctcaaagaaagctacaattttatgaagataggcatcagcttcctgcaccaaagtgggcagaattagcaaaccttataaataattgtatggattatgaaccagatttcaggccttctttcagagccatcatacgagatcttaacagtttgtttactccagattatgaactattaacagaaaatgacatgttaccaaatatgaggataggtgccctggggttttctggtgcctttgaagaccgggatcctacacagtttgaagagagacatttgaaatttctacagcaacttggcaagggtaattttgggagtgtggagatgtgccggtatgaccctctacaggacaacactggggaggtggtcgctgtaaaaaagcttcagcatagtactgaagagcacctaagagactttgaaagggaaattgaaatcctgaaatccctacagcatgacaacattgtaaagtacaagggagtgtgctacagtgctggtcggcgtaatctaaaattaattatggaatatttaccatatggaagtttacgagactatcttcaaaaacataaagaacggatagatcacataaaacttctgcagtacacatctcagatatgcaagggtatggagtatcttggtacaaaaaggtatatccacagggatctggcaacgagaaatatattggtggagaacgagaacagagttaaaattggagattttgggttaaccaaagtcttgccacaagacaaagaatactataaagtaaaagaacctggtgaaagtcccatattctggtatgctccagaatcactgacagagagcaagttttctgtggcctcagatgtttggagctttggagtggttctgtatgaacttttcacatacattgagaagagtaaaagtccaccagcggaatttatgcgtatgattggcaatgacaaacaaggacagatgatcgtgttccatttgatagaacttttgaagaataatggaagattaccaagaccagatggatgcccagatgagatctatatgatcatgacagaatgctggaacaataatgtaaatcaacgcccctcctttagggatctagctcttcgagtggatcaaataagggataacatggctggatgaaagaaatgaccttcattctgagaccaaagtagatttacagaacaaagttttatatttcacattgctgtggactattattacatatatcattattatataaatcatgatgctagccagcaaagatgtgaaaatatctgctcaaaactttcaaagtttagtaagtttttcttcatgaggccaccagtaaaagacattaatgagaattccttagcaaggattttgtaagaagtttcttaaacattgtcagttaacatcactcttgtctggcaaaagaaaaaaaatagactttttcaactcagctttttgagacctgaaaaaattattatgtaaattttgcaatgttaaagatgcacagaatatgtatgtatagtttttaccacagtggatgtataataccttggcatcttgtgtgatgttttacacacatgagggctggtgttcattaatactgttttctaatttttccatagttaatctataattaattacttcactatacaaacaaattaagatgttcagataattgaataagtacctttgtgtccttgttcatttatatcgctggccagcattataagcaggtgtatacttttagcttgtagttccatgtactgtaaatatttttcacataaagggaacaaatgtctagttttatttgtataggaaatttccctgaccctaaataatacattttgaaatgaaacaagcttacaaagatataatctattttattatggtttcccttgtatctatttgtggtgaatgtgttttttaaatggaactatctccaaatttttctaagactactatgaacagttttcttttaaaattttgagattaagaatgccaggaatattgtcatcctttgagctgctgactgccaataacattcttcgatctctgggatttatgctcatgaactaaatttaagcttaagccataaaatagattagattgttttttaaaaatggatagctcattaagaagtgcagcaggttaagaattttttcctaaagactgtatatttgaggggtttcagaattttgcattgcagtcatagaagagatttatttcctttttagaggggaaatgaggtaaataagtaaaaaagtatgcttgttaattttattcaagaatgccagtagaaaattcataacgtgtatctttaagaaaaatgagcatacatcttaaatcttttcaattaagtataaggggttgttcgttgttgtcatttgttatagtgctactccactttagacaccatagctaaaataaaatatggtgggttttgtgtgtgtgtgtgtgtgtgtgtgtgtgtgtgtgtgtgtgttatttatacaaaacttaaaatacttgctgttttgattaaaaagaaaatagtttcttacttta

SEQ ID NO: 47 - protein, 1132 aa, Homo sapiens
MGMACLTMTEMEGTSTSSIYQNGDISGNANSMKQIDPVLQVYLYHSLGKSEADYLTFPSGEYVAEEICIAASKACGITPVYHNMFALMSETERIWYPPNHVFHIDESTRHNVLYRIRFYFPRWYCSGSNRAYRHGISRGAEAPLLDDFVMSYLFAQWRHDFVHGWIKVPVTHETQEECLGMAVLDMMRIAKENDQTPLAIYNSISYKTFLPKCIRAKIQDYHILTRKRIRYRFRRFIQQFSQCKATARNLKLKYLINLETLQSAFYTEKFEVKEPGSGPSGEEIFATIIITGNGGIQWSRGKHKESETLTEQDLQLYCDFPNIIDVSIKQANQEGSNESRVVTIHKQDGKNLEIELSSLREALSFVSLIDGYYRLTADAHHYLCKEVAPPAVLENIQSNCHGPISMDFAISKLKKAGNQTGLYVLRCSPKDFNKYFLTFAVERENVIEYKHCLITKNENEEYNLSGTKKNFSSLKDLLNCYQMETVRSDNIIFQFTKCCPPKPKDKSNLLVFRTNGVSDVPTSPTLQRPTHMNQMVFHKIRNEDLIFNESLGQGTFTKIFKGVRREVGDYGQLHETEVLLKVLDKAHRNYSESFFEAASMMSKLSHKHLVLNYGVCVCGDENILVQEFVKFGSLDTYLKKNKNCINILWKLEVAKQLAWAMHFLEENTLIHGNVCAKNILLIREEDRKTGNPPFIKLSDPGISITVLPKDILQERIPWVPPECIENPKNLNLATDKWSFGTTLWEICSGGDKPLSALDSQRKLQFYEDRHQLPAPKWAELANLINNCMDYEPDFRPSFRAIIRDLNSLFTPDYELLTENDMLPNMRIGALGFSGAFEDRDPTQFEERHLKFLQQLGKGNFGSVEMCRYDPLQDNTGEVVAVKKLQHSTEEHLRDFEREIEILKSLQHDNIVKYKGVCYSAGRRNLKLIMEYLPYGSLRDYLQKHKERIDHIKLLQYTSQICKGMEYLGTKRYIHRDLATRNILVENENRVKIGDFGLTKVLPQDKEYYKVKEPGESPIFWYAPESLTESKFSVASDVWSFGVVLYELFTYIEKSKSPPAEFMRMIGNDKQGQMIVFHLIELLKNNGRLPRPDGCPDEIYMIMTECWNNNVNQRPSFRDLALRVDQIRDNMAG

SEQ ID NO: 48 - DNA, 4904 bp, Homo sapiens
attcggggagactgcaggccaaccgggaggctgagttcgaagctagcagggcggcgaagccagtgtcgcccgcggcgttgagaagacggcaaatgttctgaaaaagactctgcatgggaatggcctgccttacgatgacagaaatggagggaacatccacctcttctatatatcagaatggtgatatttctggaaatgccaattctatgaagcaaatagatccagttcttcaggtgtatctttaccattcccttgggaaatctgaggcagattatctgacctttccatctggggagtatgttgcagaagaaatctgtattgctgcttctaaagcttgtggtatcacacctgtgtatcataatatgtttgctttaatgagtgaaacagaaaggatctggtatccacccaaccatgtcttccatatagatgagtcaaccaggcataatgtactctacagaataagattttactttcctcgttggtattgcagtggcagcaacagagcctatcggcatggaatatctcgaggtgctgaagctcctcttcttgatgactttgtcatgtcttacctctttgctcagtggcggcatgattttgtgcacggatggataaaagtacctgtgactcatgaaacacaggaagaatgtcttgggatggcagtgttagatatgatgagaatagccaaagaaaacgatcaaaccccactggccatctataactctatcagctacaagacattcttaccaaaatgtattcgagcaaagatccaagactatcatattttgacaaggaagcgaataaggtacagatttcgcagatttattcagcaattcagccaatgcaaagccactgccagaaacttgaaacttaagtatcttataaatctggaaactctgcagtctgccttctacacagagaaatttgaagtaaaagaacctggaagtggtccttcaggtgaggagatttttgcaaccattataataactggaaacggtggaattcagtggtcaagagggaaacataaagaaagtgagacactgacagaacaggatttacagttatattgcgattttcctaatattattgatgtcagtattaagcaagcaaaccaagagggttcaaatgaaagccgagttgtaactatccataagcaagatggtaaaaatctggaaattgaacttagctcattaagggaagctttgtctttcgtgtcattaattgatggatattatagattaactgcagatgcacatcattacctctgtaaagaagtagcacctccagccgtgcttgaaaatatacaaagcaactgtcatggcccaatttcgatggattttgccattagtaaactgaagaaagcaggtaatcagactggactgtatgtacttcgatgcagtcctaaggactttaataaatattttttgacttttgctgtcgagcgagaaaatgtcattgaatataaacactgtttgattacaaaaaatgagaatgaagagtacaacctcagtgggacaaagaagaacttcagcagtcttaaagatcttttgaattgttaccagatggaaactgttcgctcagacaatataattttccagtttactaaatgctgtcccccaaagccaaaagataaatcaaaccttctagtcttcagaacgaatggtgtttctgatgtaccaacctcaccaacattacagaggcctactcatatgaaccaaatggtgtttcacaaaatcagaaatgaagatttgatatttaatgaaagccttggccaaggcacttttacaaagatttttaaaggcgtacgaagagaagtaggagactacggtcaactgcatgaaacagaagttcttttaaaagttctggataaagcacacagaaactattcagagtctttctttgaagcagcaagtatgatgagcaagctttctcacaagcatttggttttaaattatggagtatgtgtctgtggagacgagaatattctggttcaggagtttgtaaaatttggatcactagatacatatctgaaaaagaataaaaattgtataaatatattatggaaacttgaagttgctaaacagttggcatgggccatgcattttctagaagaaaacacccttattcatgggaatgtatgtgccaaaaatattctgcttatcagagaagaagacaggaagacaggaaatcctcctttcatcaaacttagtgatcctggcattagtattacagttttgccaaaggacattcttcaggagagaataccatgggtaccacctgaatgcattgaaaatcctaaaaatttaaatttggcaacagacaaatggagttttggtaccactttgtgggaaatctgcagtggaggagataaacctctaagtgctctggattctcaaagaaagctacaattttatgaagataggcatcagcttcctgcaccaaagtgggcagaattagcaaaccttataaataattgtatggattatgaaccagatttcaggccttctttcagagccatcatacgagatcttaacagtttgtttactccagattatgaactattaacagaaaatgacatgttaccaaatatgaggataggtgccctggggttttctggtgcctttgaagaccgggatcctacacagtttgaagagagacatttgaaatttctacagcaacttggcaagggtaattttgggagtgtggagatgtgccggtatgaccctctacaggacaacactggggaggtggtcgctgtaaaaaagcttcagcatagtactgaagagcacctaagagactttgaaagggaaattgaaatcctgaaatccctacagcatgacaacattgtaaagtacaagggagtgtgctacagtgctggtcggcgtaatctaaaattaattatggaatatttaccatatggaagtttacgagactatcttcaaaaacataaagaacggatagatcacataaaacttctgcagtacacatctcagatatgcaagggtatggagtatcttggtacaaaaaggtatatccacagggatctggcaacgagaaatatattggtggagaacgagaacagagttaaaattggagattttgggttaaccaaagtcttgccacaagacaaagaatactataaagtaaaagaacctggtgaaagtcccatattctggtatgctccagaatcactgacagagagcaagttttctgtggcctcagatgtttggagctttggagtggttctgtatgaacttttcacatacattgagaagagtaaaagtccaccagcggaatttatgcgtatgattggcaatgacaaacaaggacagatgatcgtgttccatttgatagaacttttgaagaataatggaagattaccaagaccagatggatgcccagatgagatctatatgatcatgacagaatgctggaacaataatgtaaatcaacgcccctcctttagggatctagctcttcgagtggatcaaataagggataacatggctggatgaaagaaatgaccttcattctgagaccaaagtagatttacagaacaaagttttatatttcacattgctgtggactattattacatatatcattattatataaatcatgatgctagccagcaaagatgtgaaaatatctgctcaaaactttcaaagtttagtaagtttttcttcatgaggccaccagtaaaagacattaatgagaattccttagcaaggattttgtaagaagtttcttaaacattgtcagttaacatcactcttgtctggcaaaagaaaaaaaatagactttttcaactcagctttttgagacctgaaaaaattattatgtaaattttgcaatgttaaagatgcacagaatatgtatgtatagtttttaccacagtggatgtataataccttggcatcttgtgtgatgttttacacacatgagggctggtgttcattaatactgttttctaatttttccatagttaatctataattaattacttcactatacaaacaaattaagatgttcagataattgaataagtacctttgtgtccttgttcatttatatcgctggccagcattataagcaggtgtatacttttagcttgtagttccatgtactgtaaatatttttcacataaagggaacaaatgtctagttttatttgtataggaaatttccctgaccctaaataatacattttgaaatgaaacaagcttacaaagatataatctattttattatggtttcccttgtatctatttgtggtgaatgtgttttttaaatggaactatctccaaatttttctaagactactatgaacagttttcttttaaaattttgagattaagaatgccaggaatattgtcatcctttgagctgctgactgccaataacattcttcgatctctgggatttatgctcatgaactaaatttaagcttaagccataaaatagattagattgttttttaaaaatggatagctcattaagaagtgcagcaggttaagaattttttcctaaagactgtatatttgaggggtttcagaattttgcattgcagtcatagaagagatttatttcctttttagaggggaaatgaggtaaataagtaaaaaagtatgcttgttaattttattcaagaatgccagtagaaaattcataacgtgtatctttaagaaaaatgagcatacatcttaaatcttttcaattaagtataaggggttgttcgttgttgtcatttgttatagtgctactccactttagacaccatagctaaaataaaatatggtgggttttgtgtgtgtgtgtgtgtgtgtgtgtgtgtgtgtgtgtgtgttatttatacaaaacttaaaatacttgctgttttgattaaaaagaaaatagtttcttacttta

SEQ ID NO: 49 - protein, 1132 aa, Homo sapiens; identical to SEQ ID NO: 47

SEQ ID NO: 50 - DNA, 5217 bp, Homo sapiens
gggagtggtgtggggctgcaggaaggagagaggaagaggagcagaagggggcagcagcggacgccgctaacggcctccctcggcgctgacaggctgggccggcgcccggctcgcttgggtgttcgcgtcgccacttcggcttctcggccggtcgggcccctcggcccgggcttgcggcgcgcgtcggggctgagggctgctgcggcgcagggagaggcctggtcctcgctgccgagggatgtgagtgggagctgagcccacactggagggcccccgagggcccagcctggaggtcgttcagagccgtgcccgtcccggggcttcgcagaccttgacccgccgggtaggagccgcccctgcgggctcgagggcgcgctctggtcgcccgatctgtgtagccggcaaatgttctgaaaaagactctgcatgggaatggcctgccttacgatgacagaaatggagggaacatccacctcttctatatatcagaatggtgatatttctggaaatgccaattctatgaagcaaatagatccagttcttcaggtgtatctttaccattcccttgggaaatctgaggcagattatctgacctttccatctggggagtatgttgcagaagaaatctgtattgctgcttctaaagcttgtggtatcacacctgtgtatcataatatgtttgctttaatgagtgaaacagaaaggatctggtatccacccaaccatgtcttccatatagatgagtcaaccaggcataatgtactctacagaataagattttactttcctcgttggtattgcagtggcagcaacagagcctatcggcatggaatatctcgaggtgctgaagctcctcttcttgatgactttgtcatgtcttacctctttgctcagtggcggcatgattttgtgcacggatggataaaagtacctgtgactcatgaaacacaggaagaatgtcttgggatggcagtgttagatatgatgagaatagccaaagaaaacgatcaaaccccactggccatctataactctatcagctacaagacattcttaccaaaatgtattcgagcaaagatccaagactatcatattttgacaaggaagcgaataaggtacagatttcgcagatttattcagcaattcagccaatgcaaagccactgccagaaacttgaaacttaagtatcttataaatctggaaactctgcagtctgccttctacacagagaaatttgaagtaaaagaacctggaagtggtccttcaggtgaggagatttttgcaaccattataataactggaaacggtggaattcagtggtcaagagggaaacataaagaaagtgagacactgacagaacaggatttacagttatattgcgattttcctaatattattgatgtcagtattaagcaagcaaaccaagagggttcaaatgaaagccgagttgtaactatccataagcaagatggtaaaaatctggaaattgaacttagctcattaagggaagctttgtctttcgtgtcattaattgatggatattatagattaactgcagatgcacatcattacctctgtaaagaagtagcacctccagccgtgcttgaaaatatacaaagcaactgtcatggcccaatttcgatggattttgccattagtaaactgaagaaagcaggtaatcagactggactgtatgtacttcgatgcagtcctaaggactttaataaatattttttgacttttgctgtcgagcgagaaaatgtcattgaatataaacactgtttgattacaaaaaatgagaatgaagagtacaacctcagtgggacaaagaagaacttcagcagtcttaaagatcttttgaattgttaccagatggaaactgttcgctcagacaatataattttccagtttactaaatgctgtcccccaaagccaaaagataaatcaaaccttctagtcttcagaacgaatggtgtttctgatgtaccaacctcaccaacattacagaggcctactcatatgaaccaaatggtgtttcacaaaatcagaaatgaagatttgatatttaatgaaagccttggccaaggcacttttacaaagatttttaaaggcgtacgaagagaagtaggagactacggtcaactgcatgaaacagaagttcttttaaaagttctggataaagcacacagaaactattcagagtctttctttgaagcagcaagtatgatgagcaagctttctcacaagcatttggttttaaattatggagtatgtgtctgtggagacgagaatattctggttcaggagtttgtaaaatttggatcactagatacatatctgaaaaagaataaaaattgtataaatatattatggaaacttgaagttgctaaacagttggcatgggccatgcattttctagaagaaaacacccttattcatgggaatgtatgtgccaaaaatattctgcttatcagagaagaagacaggaagacaggaaatcctcctttcatcaaacttagtgatcctggcattagtattacagttttgccaaaggacattcttcaggagagaataccatgggtaccacctgaatgcattgaaaatcctaaaaatttaaatttggcaacagacaaatggagttttggtaccactttgtgggaaatctgcagtggaggagataaacctctaagtgctctggattctcaaagaaagctacaattttatgaagataggcatcagcttcctgcaccaaagtgggcagaattagcaaaccttataaataattgtatggattatgaaccagatttcaggccttctttcagagccatcatacgagatcttaacagtttgtttactccagattatgaactattaacagaaaatgacatgttaccaaatatgaggataggtgccctggggttttctggtgcctttgaagaccgggatcctacacagtttgaagagagacatttgaaatttctacagcaacttggcaagggtaattttgggagtgtggagatgtgccggtatgaccctctacaggacaacactggggaggtggtcgctgtaaaaaagcttcagcatagtactgaagagcacctaagagactttgaaagggaaattgaaatcctgaaatccctacagcatgacaacattgtaaagtacaagggagtgtgctacagtgctggtcggcgtaatctaaaattaattatggaatatttaccatatggaagtttacgagactatcttcaaaaacataaagaacggatagatcacataaaacttctgcagtacacatctcagatatgcaagggtatggagtatcttggtacaaaaaggtatatccacagggatctggcaacgagaaatatattggtggagaacgagaacagagttaaaattggagattttgggttaaccaaagtcttgccacaagacaaagaatactataaagtaaaagaacctggtgaaagtcccatattctggtatgctccagaatcactgacagagagcaagttttctgtggcctcagatgtttggagctttggagtggttctgtatgaacttttcacatacattgagaagagtaaaagtccaccagcggaatttatgcgtatgattggcaatgacaaacaaggacagatgatcgtgttccatttgatagaacttttgaagaataatggaagattaccaagaccagatggatgcccagatgagatctatatgatcatgacagaatgctggaacaataatgtaaatcaacgcccctcctttagggatctagctcttcgagtggatcaaataagggataacatggctggatgaaagaaatgaccttcattctgagaccaaagtagatttacagaacaaagttttatatttcacattgctgtggactattattacatatatcattattatataaatcatgatgctagccagcaaagatgtgaaaatatctgctcaaaactttcaaagtttagtaagtttttcttcatgaggccaccagtaaaagacattaatgagaattccttagcaaggattttgtaagaagtttcttaaacattgtcagttaacatcactcttgtctggcaaaagaaaaaaaatagactttttcaactcagctttttgagacctgaaaaaattattatgtaaattttgcaatgttaaagatgcacagaatatgtatgtatagtttttaccacagtggatgtataataccttggcatcttgtgtgatgttttacacacatgagggctggtgttcattaatactgttttctaatttttccatagttaatctataattaattacttcactatacaaacaaattaagatgttcagataattgaataagtacctttgtgtccttgttcatttatatcgctggccagcattataagcaggtgtatacttttagcttgtagttccatgtactgtaaatatttttcacataaagggaacaaatgtctagttttatttgtataggaaatttccctgaccctaaataatacattttgaaatgaaacaagcttacaaagatataatctattttattatggtttcccttgtatctatttgtggtgaatgtgttttttaaatggaactatctccaaatttttctaagactactatgaacagttttcttttaaaattttgagattaagaatgccaggaatattgtcatcctttgagctgctgactgccaataacattcttcgatctctgggatttatgctcatgaactaaatttaagcttaagccataaaatagattagattgttttttaaaaatggatagctcattaagaagtgcagcaggttaagaattttttcctaaagactgtatatttgaggggtttcagaattttgcattgcagtcatagaagagatttatttcctttttagaggggaaatgaggtaaataagtaaaaaagtatgcttgttaattttattcaagaatgccagtagaaaattcataacgtgtatctttaagaaaaatgagcatacatcttaaatcttttcaattaagtataaggggttgttcgttgttgtcatttgttatagtgctactccactttagacaccatagctaaaataaaatatggtgggttttgtgtgtgtgtgtgtgtgtgtgtgtgtgtgtgtgtgtgtgttatttatacaaaacttaaaatacttgctgttttgattaaaaagaaaatagtttcttacttta

SEQ ID NO: 51 - protein, 1132 aa, Homo sapiens; identical to SEQ ID NO: 47

SEQ ID NO: 52 - DNA, 5205 bp, Homo sapiens
gggagtggtgtggggctgcaggaaggagagaggaagaggagcagaagggggcagcagcggacgccgctaacggcctccctcggcgctgacaggctgggccggcgcccggctcgcttgggtgttcgcgtcgccacttcggcttctcggccggtcgggcccctcggcccgggcttgcggcgcgcgtcggggctgagggctgctgcggcgcagggagaggcctggtcctcgctgccgagggatgtgagtgggagctgagcccacactggagggcccccgagggcccagcctggaggtcgttcagagccgtgcccgtcccggggcttcgcagaccttgacccgccgggtaggagccgcccctgcgggctcgagggcgcgctctggtcgcccgatctgtgtagccggtttcagaagcaggcaacaggaacaagatgtgaactgtttctcttctgcagaaaaagaggctcttcctcctcctcccgcgacggcaaatgttctgaaaaagactctgcatgggaatggcctgccttacgatgacagaaatggagggaacatccacctcttctatatatcagaatggtgatatttctggaaatgccaattctatgaagcaaatagatccagttcttcaggtgtatctttaccattcccttgggaaatctgaggcagattatctgacctttccatctggggagtatgttgcagaagaaatctgtattgctgcttctaaagcttgtggtatcacacctgtgtatcataatatgtttgctttaatgagtgaaacagaaaggatctggtatccacccaaccatgtcttccatatagatgagtcaaccaggcataatgtactctacagaataagattttactttcctcgttggtattgcagtggcagcaacagagcctatcggcatggaatatctcgaggtgctgaagctcctcttcttgatgactttgtcatgtcttacctctttgctcagtggcggcatgattttgtgcacggatggataaaagtacctgtgactcatgaaacacaggaagaatgtcttgggatggcagtgttagatatgatgagaatagccaaagaaaacgatcaaaccccactggccatctataactctatcagctacaagacattcttaccaaaatgtattcgagcaaagatccaagactatcatattttgacaaggaagcgaataaggtacagatttcgcagatttattcagcaattcagccaatgcaaagccactgccagaaacttgaaacttaagtatcttataaatctggaaactctgcagtctgccttctacacagagaaatttgaagtaaaagaacctggaagtggtccttcaggatttacagttatattgcgattttcctaatattattgatgtcagtattaagcaagcaaaccaagagggttcaaatgaaagccgagttgtaactatccataagcaagatggtaaaaatctggaaattgaacttagctcattaagggaagctttgtctttcgtgtcattaattgatggatattatagattaactgcagatgcacatcattacctctgtaaagaagtagcacctccagccgtgcttgaaaatatacaaagcaactgtcatggcccaatttcgatggattttgccattagtaaactgaagaaagcaggtaatcagactggactgtatgtacttcgatgcagtcctaaggactttaataaatattttttgacttttgctgtcgagcgagaaaatgtcattgaatataaacactgtttgattacaaaaaatgagaatgaagagtacaacctcagtgggacaaagaagaacttcagcagtcttaaagatcttttgaattgttaccagatggaaactgttcgctcagacaatataattttccagtttactaaatgctgtcccccaaagccaaaagataaatcaaaccttctagtcttcagaacgaatggtgtttctgatgtaccaacctcaccaacattacagaggcctactcatatgaaccaaatggtgtttcacaaaatcagaaatgaagatttgatatttaatgaaagccttggccaaggcacttttacaaagatttttaaaggcgtacgaagagaagtaggagactacggtcaactgcatgaaacagaagttcttttaaaagttctggataaagcacacagaaactattcagagtctttctttgaagcagcaagtatgatgagcaagctttctcacaagcatttggttttaaattatggagtatgtgtctgtggagacgagaatattctggttcaggagtttgtaaaatttggatcactagatacatatctgaaaaagaataaaaattgtataaatatattatggaaacttgaagttgctaaacagttggcatgggccatgcattttctagaagaaaacacccttattcatgggaatgtatgtgccaaaaatattctgcttatcagagaagaagacaggaagacaggaaatcctcctttcatcaaacttagtgatcctggcattagtattacagttttgccaaaggacattcttcaggagagaataccatgggtaccacctgaatgcattgaaaatcctaaaaatttaaatttggcaacagacaaatggagttttggtaccactttgtgggaaatctgcagtggaggagataaacctctaagtgctctggattctcaaagaaagctacaattttatgaagataggcatcagcttcctgcaccaaagtgggcagaattagcaaaccttataaataattgtatggattatgaaccagatttcaggccttctttcagagccatcatacgagatcttaacagtttgtttactccagattatgaactattaacagaaaatgacatgttaccaaatatgaggataggtgccctggggttttctggtgcctttgaagaccgggatcctacacagtttgaagagagacatttgaaatttctacagcaacttggcaagggtaattttgggagtgtggagatgtgccggtatgaccctctacaggacaacactggggaggtggtcgctgtaaaaaagcttcagcatagtactgaagagcacctaagagactttgaaagggaaattgaaatcctgaaatccctacagcatgacaacattgtaaagtacaagggagtgtgctacagtgctggtcggcgtaatctaaaattaattatggaatatttaccatatggaagtttacgagactatcttcaaaaacataaagaacggatagatcacataaaacttctgcagtacacatctcagatatgcaagggtatggagtatcttggtacaaaaaggtatatccacagggatctggcaacgagaaatatattggtggagaacgagaacagagttaaaattggagattttgggttaaccaaagtcttgccacaagacaaagaatactataaagtaaaagaacctggtgaaagtcccatattctggtatgctccagaatcactgacagagagcaagttttctgtggcctcagatgtttggagctttggagtggttctgtatgaacttttcacatacattgagaagagtaaaagtccaccagcggaatttatgcgtatgattggcaatgacaaacaaggacagatgatcgtgttccatttgatagaacttttgaagaataatggaagattaccaagaccagatggatgcccagatgagatctatatgatcatgacagaatgctggaacaataatgtaaatcaacgcccctcctttagggatctagctcttcgagtggatcaaataagggataacatggctggatgaaagaaatgaccttcattctgagaccaaagtagatttacagaacaaagttttatatttcacattgctgtggactattattacatatatcattattatataaatcatgatgctagccagcaaagatgtgaaaatatctgctcaaaactttcaaagtttagtaagtttttcttcatgaggccaccagtaaaagacattaatgagaattccttagcaaggattttgtaagaagtttcttaaacattgtcagttaacatcactcttgtctggcaaaagaaaaaaaatagactttttcaactcagctttttgagacctgaaaaaattattatgtaaattttgcaatgttaaagatgcacagaatatgtatgtatagtttttaccacagtggatgtataataccttggcatcttgtgtgatgttttacacacatgagggctggtgttcattaatactgttttctaatttttccatagttaatctataattaattacttcactatacaaacaaattaagatgttcagataattgaataagtacctttgtgtccttgttcatttatatcgctggccagcattataagcaggtgtatacttttagcttgtagttccatgtactgtaaatatttttcacataaagggaacaaatgtctagttttatttgtataggaaatttccctgaccctaaataatacattttgaaatgaaacaagcttacaaagatataatctattttattatggtttcccttgtatctatttgtggtgaatgtgttttttaaatggaactatctccaaatttttctaagactactatgaacagttttcttttaaaattttgagattaagaatgccaggaatattgtcatcctttgagctgctgactgccaataacattcttcgatctctgggatttatgctcatgaactaaatttaagcttaagccataaaatagattagattgttttttaaaaatggatagctcattaagaagtgcagcaggttaagaattttttcctaaagactgtatatttgaggggtttcagaattttgcattgcagtcatagaagagatttatttcctttttagaggggaaatgaggtaaataagtaaaaaagtatgcttgttaattttattcaagaatgccagtagaaaattcataacgtgtatctttaagaaaaatgagcatacatcttaaatcttttcaattaagtataaggggttgttcgttgttgtcatttgttatagtgctactccactttagacaccatagctaaaataaaatatggtgggttttgtgtgtgtgtgtgtgtgtgtgtgtgtgtgtgtgtgtgtgttatttatacaaaacttaaaatacttgctgttttgattaaaaagaaaatagtttcttacttta

SEQ ID NO: 53 - protein, 727 aa, Homo sapiens
MDFAISKLKKAGNQTGLYVLRCSPKDFNKYFLTFAVERENVIEYKHCLITKNENEEYNLSGTKKNFSSLKDLLNCYQMETVRSDNIIFQFTKCCPPKPKDKSNLLVFRTNGVSDVPTSPTLQRPTHMNQMVFHKIRNEDLIFNESLGQGTFTKIFKGVRREVGDYGQLHETEVLLKVLDKAHRNYSESFFEAASMMSKLSHKHLVLNYGVCVCGDENILVQEFVKFGSLDTYLKKNKNCINILWKLEVAKQLAWAMHFLEENTLIHGNVCAKNILLIREEDRKTGNPPFIKLSDPGISITVLPKDILQERIPWVPPECIENPKNLNLATDKWSFGTTLWEICSGGDKPLSALDSQRKLQFYEDRHQLPAPKWAELANLINNCMDYEPDFRPSFRAIIRDLNSLFTPDYELLTENDMLPNMRIGALGFSGAFEDRDPTQFEERHLKFLQQLGKGNFGSVEMCRYDPLQDNTGEVVAVKKLQHSTEEHLRDFEREIEILKSLQHDNIVKYKGVCYSAGRRNLKLIMEYLPYGSLRDYLQKHKERIDHIKLLQYTSQICKGMEYLGTKRYIHRDLATRNILVENENRVKIGDFGLTKVLPQDKEYYKVKEPGESPIFWYAPESLTESKFSVASDVWSFGVVLYELFTYIEKSKSPPAEFMRMIGNDKQGQMIVFHLIELLKNNGRLPRPDGCPDEIYMIMTECWNNNVNQRPSFRDLALRVDQIRDNMAG

SEQ ID NO: 54 - DNA, 4656 bp, Homo sapiens
cttcgtgttcgactctgagtacgaggggctcgggaagcccttggcgacccccatcagcagtgtccacaccgacctgccctcccagcctcagcttcgggacaaagatcagccgcacagcaaaaaccaggcgctgaactccaccaatggggagctgaacgcggacgaccccatggccggccactccagcgcccatcagggcgcctgcagagatggagattttactttcctcgttggtattgcagtggcagcaacagagcctatcggcatggaatatctcgaggtgctgaagctcctcttcttgatgactttgtcatgtcttacctctttgctcagtggcggcatgattttgtgcacggatggataaaagtacctgtgactcatgaaacacaggaagaatgtcttgggatggcagtgttagatatgatgagaatagccaaagaaaacgatcaaaccccactggccatctataactctatcagctacaagacattcttaccaaaatgtattcgagcaaagatccaagactatcatattttgacaaggaagcgaataaggtacagatttcgcagatttattcagcaattcagccaatgcaaagccactgccagaaacttgaaacttaagtatcttataaatctggaaactctgcagtctgccttctacacagagaaatttgaagtaaaagaacctggaagtggtccttcaggtgaggagatttttgcaaccattataataactggaaacggtggaattcagtggtcaagagggaaacataaagaaagtgagacactgacagaacaggatttacagttatattgcgattttcctaatattattgatgtcagtattaagcaagcaaaccaagagggttcaaatgaaagccgagttgtaactatccataagcaagatggtaaaaatctggaaattgaacttagctcattaagggaagctttgtctttcgtgtcattaattgatggatattatagattaactgcagatgcacatcattacctctgtaaagaagtagcacctccagccgtgcttgaaaatatacaaagcaactgtcatggcccaatttcgatggattttgccattagtaaactgaagaaagcaggtaatcagactggactgtatgtacttcgatgcagtcctaaggactttaataaatattttttgacttttgctgtcgagcgagaaaatgtcattgaatataaacactgtttgattacaaaaaatgagaatgaagagtacaacctcagtgggacaaagaagaacttcagcagtcttaaagatcttttgaattgttaccagatggaaactgttcgctcagacaatataattttccagtttactaaatgctgtcccccaaagccaaaagataaatcaaaccttctagtcttcagaacgaatggtgtttctgatgtaccaacctcaccaacattacagaggcctactcatatgaaccaaatggtgtttcacaaaatcagaaatgaagatttgatatttaatgaaagccttggccaaggcacttttacaaagatttttaaaggcgtacgaagagaagtaggagactacggtcaactgcatgaaacagaagttcttttaaaagttctggataaagcacacagaaactattcagagtctttctttgaagcagcaagtatgatgagcaagctttctcacaagcatttggttttaaattatggagtatgtgtctgtggagacgagaatattctggttcaggagtttgtaaaatttggatcactagatacatatctgaaaaagaataaaaattgtataaatatattatggaaacttgaagttgctaaacagttggcatgggccatgcattttctagaagaaaacacccttattcatgggaatgtatgtgccaaaaatattctgcttatcagagaagaagacaggaagacaggaaatcctcctttcatcaaacttagtgatcctggcattagtattacagttttgccaaaggacattcttcaggagagaataccatgggtaccacctgaatgcattgaaaatcctaaaaatttaaatttggcaacagacaaatggagttttggtaccactttgtgggaaatctgcagtggaggagataaacctctaagtgctctggattctcaaagaaagctacaattttatgaagataggcatcagcttcctgcaccaaagtgggcagaattagcaaaccttataaataattgtatggattatgaaccagatttcaggccttctttcagagccatcatacgagatcttaacagtttgtttactccagattatgaactattaacagaaaatgacatgttaccaaatatgaggataggtgccctggggttttctggtgcctttgaagaccgggatcctacacagtttgaagagagacatttgaaatttctacagcaacttggcaagggtaattttgggagtgtggagatgtgccggtatgaccctctacaggacaacactggggaggtggtcgctgtaaaaaagcttcagcatagtactgaagagcacctaagagactttgaaagggaaattgaaatcctgaaatccctacagcatgacaacattgtaaagtacaagggagtgtgctacagtgctggtcggcgtaatctaaaattaattatggaatatttaccatatggaagtttacgagactatcttcaaaaacataaagaacggatagatcacataaaacttctgcagtacacatctcagatatgcaagggtatggagtatcttggtacaaaaaggtatatccacagggatctggcaacgagaaatatattggtggagaacgagaacagagttaaaattggagattttgggttaaccaaagtcttgccacaagacaaagaatactataaagtaaaagaacctggtgaaagtcccatattctggtatgctccagaatcactgacagagagcaagttttctgtggcctcagatgtttggagctttggagtggttctgtatgaacttttcacatacattgagaagagtaaaagtccaccagcggaatttatgcgtatgattggcaatgacaaacaaggacagatgatcgtgttccatttgatagaacttttgaagaataatggaagattaccaagaccagatggatgcccagatgagatctatatgatcatgacagaatgctggaacaataatgtaaatcaacgcccctcctttagggatctagctcttcgagtggatcaaataagggataacatggctggatgaaagaaatgaccttcattctgagaccaaagtagatttacagaacaaagttttatatttcacattgctgtggactattattacatatatcattattatataaatcatgatgctagccagcaaagatgtgaaaatatctgctcaaaactttcaaagtttagtaagtttttcttcatgaggccaccagtaaaagacattaatgagaattccttagcaaggattttgtaagaagtttcttaaacattgtcagttaacatcactcttgtctggcaaaagaaaaaaaatagactttttcaactcagctttttgagacctgaaaaaattattatgtaaattttgcaatgttaaagatgcacagaatatgtatgtatagtttttaccacagtggatgtataataccttggcatcttgtgtgatgttttacacacatgagggctggtgttcattaatactgttttctaatttttccatagttaatctataattaattacttcactatacaaacaaattaagatgttcagataattgaataagtacctttgtgtccttgttcatttatatcgctggccagcattataagcaggtgtatacttttagcttgtagttccatgtactgtaaatatttttcacataaagggaacaaatgtctagttttatttgtataggaaatttccctgaccctaaataatacattttgaaatgaaacaagcttacaaagatataatctattttattatggtttcccttgtatctatttgtggtgaatgtgttttttaaatggaactatctccaaatttttctaagactactatgaacagttttcttttaaaattttgagattaagaatgccaggaatattgtcatcctttgagctgctgactgccaataacattcttcgatctctgggatttatgctcatgaactaaatttaagcttaagccataaaatagattagattgttttttaaaaatggatagctcattaagaagtgcagcaggttaagaattttttcctaaagactgtatatttgaggggtttcagaattttgcattgcagtcatagaagagatttatttcctttttagaggggaaatgaggtaaataagtaaaaaagtatgcttgttaattttattcaagaatgccagtagaaaattcataacgtgtatctttaagaaaaatgagcatacatcttaaatcttttcaattaagtataaggggttgttcgttgttgtcatttgttatagtgctactccactttagacaccatagctaaaataaaatatggtgggttttgtgtgtgtgtgtgtgtgtgtgtgtgtgtgtgtgtgtgtgttatttatacaaaacttaaaatacttgctgttttgattaaaaagaaaatagtttcttacttta

SEQ ID NO: 55 - protein, 983 aa, Homo sapiens
MSYLFAQWRHDFVHGWIKVPVTHETQEECLGMAVLDMMRIAKENDQTPLAIYNSISYKTFLPKCIRAKIQDYHILTRKRIRYRFRRFIQQFSQCKATARNLKLKYLINLETLQSAFYTEKFEVKEPGSGPSGEEIFATIIITGNGGIQWSRGKHKESETLTEQDLQLYCDFPNIIDVSIKQANQEGSNESRVVTIHKQDGKNLEIELSSLREALSFVSLIDGYYRLTADAHHYLCKEVAPPAVLENIQSNCHGPISMDFAISKLKKAGNQTGLYVLRCSPKDFNKYFLTFAVERENVIEYKHCLITKNENEEYNLSGTKKNFSSLKDLLNCYQMETVRSDNIIFQFTKCCPPKPKDKSNLLVFRTNGVSDVPTSPTLQRPTHMNQMVFHKIRNEDLIFNESLGQGTFTKIFKGVRREVGDYGQLHETEVLLKVLDKAHRNYSESFFEAASMMSKLSHKHLVLNYGVCVCGDENILVQEFVKFGSLDTYLKKNKNCINILWKLEVAKQLAWAMHFLEENTLIHGNVCAKNILLIREEDRKTGNPPFIKLSDPGISITVLPKDILQERIPWVPPECIENPKNLNLATDKWSFGTTLWEICSGGDKPLSALDSQRKLQFYEDRHQLPAPKWAELANLINNCMDYEPDFRPSFRAIIRDLNSLFTPDYELLTENDMLPNMRIGALGFSGAFEDRDPTQFEERHLKFLQQLGKGNFGSVEMCRYDPLQDNTGEVVAVKKLQHSTEEHLRDFEREIEILKSLQHDNIVKYKGVCYSAGRRNLKLIMEYLPYGSLRDYLQKHKERIDHIKLLQYTSQICKGMEYLGTKRYIHRDLATRNILVENENRVKIGDFGLTKVLPQDKEYYKVKEPGESPIFWYAPESLTESKFSVASDVWSFGVVLYELFTYIEKSKSPPAEFMRMIGNDKQGQMIVFHLIELLKNNGRLPRPDGCPDEIYMIMTECWNNNVNQRPSFRDLALRVDQIRDNMAG

SEQ ID NO: 56 - DNA, 5285 bp, Homo sapiens
ctgcaggaaggagagaggaagaggagcagaagggggcagcagcggacgccgctaacggcctccctcggcgctgacaggctgggccggcgcccggctcgcttgggtgttcgcgtcgccacttcggcttctcggccggtcgggcccctcggcccgggcttgcggcgcgcgtcggggctgagggctgctgcggcgcagggagaggcctggtcctcgctgccgagggatgtgagtgggagctgagcccacactggagggcccccgagggcccagcctggaggtcgttcagagccgtgcccgtcccggggcttcgcagaccttgacccgccgggtaggagccgcccctgcgggctcgagggcgcgctctggtcgcccgatctgtgtagccggtttcagaagcaggcaacaggaacaagatgtgaactgtttctcttctgcagaaaaagaggctcttcctcctcctcccgcgacggcaaatgttctgaaaaagactctgcatgggaatggcctgccttacgatgacagaaatggagggaacatccacctcttctatatatcagaatggtgatatttctggaaatgccaattctatgaagcaaatagatccagttcttcaggtgtatctttaccattcccttgggaaatctgaggcagattatctgacctttccatctggggagtatgttgcagaagaaatctgtattgctgcttctaaagcttgtggtatcacacctgtgtatcataatatgtttgctttaatgagtgaaacagaaaggatctggtatccacccaaccatgtcttccatatagatgagtcaaccaggcataatgtactctacagaataagattttactttcctcgttggtattgcagtggcagcaacagagcctatcggcatggaatatctcgaggtgctgaagctcctcttcttgatgactttgtcatgtcttacctctttgctcagtggcggcatgattttgtgcacggatggataaaagtacctgtgactcatgaaacacaggaagaatgtcttgggatggcagtgttagatatgatgagaatagccaaagaaaacgatcaaaccccactggccatctataactctatcagctacaagacattcttaccaaaatgtattcgagcaaagatccaagactatcatattttgacaaggaagcgaataaggtacagatttcgcagatttattcagcaattcagccaatgcaaagccactgccagaaacttgaaacttaagtatcttataaatctggaaactctgcagtctgccttctacacagagaaatttgaagtaaaagaacctggaagtggtccttcaggtgaggagatttttgcaaccattataataactggaaacggtggaattcagtggtcaagagggaaacataaagaaagtgagacactgacagaacaggatttacagttatattgcgattttcctaatattattgatgtcagtattaagcaagcaaaccaagagggttcaaatgaaagccgagttgtaactatccataagcaagatggtaaaaatctggaaattgaacttagctcattaagggaagctttgtctttcgtgtcattaattgatggatattatagattaactgcagatgcacatcattacctctgtaaagaagtagcacctccagccgtgcttgaaaatatacaaagcaactgtcatggcccaatttcgatggattttgccattagtaaactgaagaaagcaggtaatcagactggactgtatgtacttcgatgcagtcctaaggactttaataaatattttttgacttttgctgtcgagcgagaaaatgtcattgaatataaacactgtttgattacaaaaaatgagaatgaagagtacaacctcagtgggacaaagaagaacttcagcagtcttaaagatcttttgaattgttaccagatggaaactgttcgctcagacaatataattttccagtttactaaatgctgtcccccaaagccaaaagataaatcaaaccttctagtcttcagaacgaatggtgtttctgatgtaccaacctcaccaacattacagaggcctactcatatgaaccaaatggtgtttcacaaaatcagaaatgaagatttgatatttaatgaaagccttggccaaggcacttttacaaagatttttaaaggcgtacgaagagaagtaggagactacggtcaactgcatgaaacagaagttcttttaaaagttctggataaagcacacagaaactattcagagtctttctttgaagcagcaagtatgatgagcaagctttctcacaagcatttggttttaaattatggagtatgtgtctgtggagacgagaatattctggttcaggagtttgtaaaatttggatcactagatacatatctgaaaaagaataaaaattgtataaatatattatggaaacttgaagttgctaaacagttggcatgggccatgcattttctagaagaaaacacccttattcatgggaatgtatgtgccaaaaatattctgcttatcagagaagaagacaggaagacaggaaatcctcctttcatcaaacttagtgatcctggcattagtattacagttttgccaaaggacattcttcaggagagaataccatgggtaccacctgaatgcattgaaaatcctaaaaatttaaatttggcaacagacaaatggagttttggtaccactttgtgggaaatctgcagtggaggagataaacctctaagtgctctggattctcaaagaaagctacaattttatgaagataggcatcagcttcctgcaccaaagtgggcagaattagcaaaccttataaataattgtatggattatgaaccagatttcaggccttctttcagagccatcatacgagatcttaacagtttgtttactccagattatgaactattaacagaaaatgacatgttaccaaatatgaggataggtgccctggggttttctggtgcctttgaagaccgggatcctacacagtttgaagagagacatttgaaatttctacagcaacttggcaagggtaattttgggagtgtggagatgtgccggtatgaccctctacaggacaacactggggaggtggtcgctgtaaaaaagcttcagcatagtactgaagagcacctaagagactttgaaagggaaattgaaatcctgaaatccctacagcatgacaacattgtaaagtacaagggagtgtgctacagtgctggtcggcgtaatctaaaattaattatggaatatttaccatatggaagtttacgagactatcttcaaaaacataaagaacggatagatcacataaaacttctgcagtacacatctcagatatgcaagggtatggagtatcttggtacaaaaaggtatatccacagggatctggcaacgagaaatatattggtggagaacgagaacagagttaaaattggagattttgggttaaccaaagtcttgccacaagacaaagaatactataaagtaaaagaacctggtgaaagtcccatattctggtatgctccagaatcactgacagagagcaagttttctgtggcctcagatgtttggagctttggagtggttctgtatgaacttttcacatacattgagaagagtaaaagtccaccagcggaatttatgcgtatgattggcaatgacaaacaaggacagatgatcgtgttccatttgatagaacttttgaagaataatggaagattaccaagaccagatggatgcccagatgagatctatatgatcatgacagaatgctggaacaataatgtaaatcaacgcccctcctttagggatctagctcttcgagtggatcaaataagggataacatggctggatgaaagaaatgaccttcattctgagaccaaagtagatttacagaacaaagttttatatttcacattgctgtggactattattacatatatcattattatataaatcatgatgctagccagcaaagatgtgaaaatatctgctcaaaactttcaaagtttagtaagtttttcttcatgaggccaccagtaaaagacattaatgagaattccttagcaaggattttgtaagaagtttcttaaacattgtcagttaacatcactcttgtctggcaaaagaaaaaaaatagactttttcaactcagctttttgagacctgaaaaaattattatgtaaattttgcaatgttaaagatgcacagaatatgtatgtatagtttttaccacagtggatgtataataccttggcatcttgtgtgatgttttacacacatgagggctggtgttcattaatactgttttctaatttttccatagttaatctataattaattacttcactatacaaacaaattaagatgttcagataattgaataagtacctttgtgtccttgttcatttatatcgctggccagcattataagcaggtgtatacttttagcttgtagttccatgtactgtaaatatttttcacataaagggaacaaatgtctagttttatttgtataggaaatttccctgaccctaaataatacattttgaaatgaaacaagcttacaaagatataatctattttattatggtttcccttgtatctatttgtggtgaatgtgttttttaaatggaactatctccaaatttttctaagactactatgaacagttttcttttaaaattttgagattaagaatgccaggaatattgtcatcctttgagctgctgactgccaataacattcttcgatctctgggatttatgctcatgaactaaatttaagcttaagccataaaatagattagattgttttttaaaaatggatagctcattaagaagtgcagcaggttaagaattttttcctaaagactgtatatttgaggggtttcagaattttgcattgcagtcatagaagagatttatttcctttttagaggggaaatgaggtaaataagtaaaaaagtatgcttgttaattttattcaagaatgccagtagaaaattcataacgtgtatctttaagaaaaatgagcatacatcttaaatcttttcaattaagtataaggggttgttcgttgttgtcatttgttatagtgctactccactttagacaccatagctaaaataaaatatggtgggttttgtgtgtgtgtgtgtgtgtgtgtgtgtgtgtgtgtgtgtgttatttatacaaaacttaaaatacttgctgttttgattaaaaagaaaatagtttcttacttta

SEQ ID NO: 57 - protein, 1132 aa, Homo sapiens; identical to SEQ ID NO: 47

SEQ ID NO: 58 - DNA, 87976 bp, Homo sapiens
agatcacttgaagtctggagtttgagaccagcctggccaaacatggagaaaccctgtctctactaaaaatacagaaattaacctggtgttgtggcacatgcctgttatcccaccaactgaggtaggaagattgcttgaacctgggaggcagaggttgctataagccaagatcatgccactgcactccaccctggatgacagagcaagactttatctcaaaaacaaaaggtaatatgtccatggctcacaactgtaatgccagcactttgggaggccgaggcaggaggatcacttgaggttaggagttcgagactatcctgggcaacatagcgagaccctgtctctacaaaaaatttaaaaaaaaaattagctcggggtggtgggatgtgtctgtggccctacctactcctagctactcaggagtctgaggtgggaggatggcttaagcccaggaggtcaagactgcggtgagccatgatcatgctactgcactccagcctgggtgacagagtgagaccttgtctcaaaaaaaaaagacaatcaaaagttgccatagtctgatggttacccagaggtaaccattattgacattttgttgccaggcacagtggctcatgcctgcaatcccagcactttgggaggctgaggtgggagaattacttgagcccaggaggtcaaggctacaataagctgagattgcaccattgcactccagtgtaggcaacagagagaccctgtctcaaacaaacgaaaaagacattttggtaatttaaacacgttttcctccctactgggagactgaacagcaggatttaaacgatggtgaatggaaggtgagctatgagttagggctgcccatcacatgggcagattctgtgacttaatgacaataataaggtcatgaagtctcctatacagggtcttgctctgtcacccaagctggagtgcaatggcgcaaccatggctcactgcagcctcaaactcttgggctcaaatgatcctcctgcctcagcctcctgagtagctgggactataggcacatgctgccacgcccagctgaagtcatgctctctatccatgagcatctttataacttgcatagatatatttgggtgaaatcctgtcttggtctttcccgattctccctgagcaggttccaaacattgtttagggctcaaagggaaattagtcttcagagtttctccagtaaagtaattacggagatcgggtcatttattcaacagattgggtgcctaccatgtgccaagactgtgccaggcactggggatatgatgatgaaaccaaagatgctagcatgaacacaatcactaaaccaaagtcacacaaataaattaaatgtgggagggacaaggagagctatacatgtactgatcatctgctatgctggaagtttatttagcaaatgtaatcttatttaatcatctggacccaagggaggtaatctgacctctctgaatctcagcttcatgtgaaaacggggataatattattgagagagaacatttgttacaggggcaaaccctgttccaaggtttctttcactcaaagtataaacaatgaggcactttttacactttagacactaaaactttttggaggcaaagagggctggtatttagtgagtatctgctatgtgctaggcactttacagagatctcatttaatctcagttccattctttgaatttgctatgtaccctgctgtccaaatgacggcactgagtcagtgagaggtttcataacttgcccaaggccacagaactggatggagaaagactgcagagattcaaacccaggcctgctgacatgcagagccaatgagaatatattatcttgcagtgcagtttatgggatatatgtgtccctttgggaattcctgggtgtctgctggtggcctgttaacttggttcttgaatatgcactttgcttataactgtgcagtttgaaaagtgactcatccccaaactaggcagggttgagtgtctgtcctgtttatcttccacatgccacctgcactaacttctgaagataatctataataaaagcactgtgattaaaaaacagaaaaacacacaccaaaaatgtataggtttgtctgttggtgcttctgacaagaaaataaactcatgaatctcattaactttaaaaaaatcacatctacttaaggtttaatgactaaagccaactttctaacatatctgtaccgttctctgaacatactgttttcacacttaactacgatgttgtcacttgtttctgtctgattctgcaagggcagagaccttgaaatattcaaatctggattcccccatggtttgacccagctgaagtcaggcagtgttcgctgaaagaaataaaggtgtttccataatgcctgtattagctttcttttggggctgtaagaagttaccacagatttagtgtcataaaacaatattcatttctgtttcacgcttcttgtgggcccgacgtctggattccatggctcagctgattctctgcttccagtctcacgaggctgaaatcaaggtgtctatattcctttctagagagttggggagggggtataatctgttcccaagttcattcagcttgtcagaattcagctctgtgaggttgtaggactgaagtccccatttccttgctggctcttggcaggacttcctctgagcttttggaggctgcctggattccctggcttgtggccactttcaaagccagtaacagtgggttgaattcctctcatactttgaatttaattcctctgcctcatctctccaaaacatctcttttgcctcccttttgtgcttttaagggttcatgtgattacactgggctcacccatataatacggaatcatctaattttaagggctttatttccattggcaaaatatcttttgccaaagaatgctggctggtaatcccagcactttgggaggccgagatgggtggatcacctgaggtcaggagttcaagaccagcctggccaacatggagaaacccagtcactactaaagatacaaaaattagctgggcatggtagcgcatgcctgtaatctcagctacttgggaggctgaggcaggaggatcgcatgaacccaggaggcggaggttgcagttagccaagatcacgccactgcactccagcctgggtaacacagcgagactctgtctcaaaaaataaataaataaataaataaaaaagcaacatattcacaggttccagggactaggacttggacagttttgggcaagcggggaagacattattctgtctaccacagtacctgtattaaacatgtaaatttcagttattccctgtaggtcagagggcagtaaagctacttcagaagacatcggaaagaagccaaatgacttgccaaagagtactgtatcagccgtagattgaaaaaaaagaagttaaaaatcctttgtaaaaaatcaaggcaaacagttttttgagggacagtagttcctcctttctctcagggtaaagctagagagatttttaagaggtgtcttattctaacttgcagtcttttccctttgtaggattttgcttaccggactcacaagttttctgtgaccagtattagaagcagaaaacactgaaccccttggcgttagagtttgggctacaccataatggtctcctatcaatactggctctcgctacgtgttaacattagggagtggagagtgtgtttcctcacccagggaaaccgtttaaatgtggccactgatcctgccttcatagtttttaagagctggcatcaatccaactccggacggactctagaaatgtttctggacaacgactgaacctatagttacagaaaacctatgtgctgggcgctctgaatttcatttcaggttctaaaactaaggctcagagaggctaagtatattgcctattgtttctcagctggtaataacagctaccatttattaaacatttgctctatgccaggcgccatatcatacggacctgataatgtcaagatctcccttcacatcctcttccaatctgtcaagaattgtatgttaattttaattccaataatgccatgaaatacaagacaaatgcagatcagaaaactgaggctcagagaggttgagtggacagccagggagtgactcagccaagattccagtctaggtccgctggactccagggcctgaattctctccagggtactgcctctaaaaacgccctcaggtgcattctggtcagtatggccccagagtccaagttctttacacgacccgtcaacatatcaccaagttcctaagaacgctctaggctgctggtgcaggctctgcaaatacacagcggcctgaaagcacaggaagaaatgaagaaccgtctaagtccatcagccgtggaataaccgttttactggtatgagggtctttttgtctcattattatgtggcagtgagtcatttagaggtgaccaaaagggaaagtcctgcctctcgtcccctacgagaagtgtaggtaagaaccgtttaggcgaggagaagcacgaagtgggaactgcgagtcgagctccccatcctcactccccacccgcacccgccaggaggtcctgaagcaaaaagcaccgaaggggttaagggtggccgggggagcccagccaccgccccttcccagcatcgcctcccagaatcccgcaggcccccagccagttctcgcacctcgcgagactccacccagccccttccccgaacagcgacccgtccccgttcctagctgaggtcggtgctaggcggaggacgcgagagggagagcggaagggggccgccgggcacgccgggaagtgtggtccacgcgcttcacgcggccatattcttccggagcgggggaggccagagaggccgttgggactacgactcccaggcgccctttcggtttgtttttgttcaaaaaaaaaaaaccccacactccccctcctcactcttcacacacactcacacacacccacggcagacacgcacgcacccgggcgccgaagggaaagccgcgtctcgccctcccgccccgccgtcggtcctgtctcagtccctcagcagagcgggaaagcggaggccggagccgtgacctctgaccccgtggttatgcggagccgccgcattccttagcgatcgcggggcagccgccgctgccgccgtgggcgactgacgcagcgcgggcgcgtggagccgccgccgcccctcccccaccgccgctctcgcgccagccggtccccgcgtgcccgccccttctccccggccgcacccgagacctcgcgcgccgccgctgccacgcgccccccccaccgccgccgccgccccagccccgcgccaccgccccagcccgcccagcccggaggtcccgcgtggagctgccgccgccgccggggagaaggatgaaggacaaacagaagaagaagaaggagcgcacgtgggccgaggccgcgcgcctggtgaggcggacagccgaggggggctccgtggggcccggggtggggggggctcgccgcgcacccccccactggggggggaggggcaaggccctgcccaccgcgggagggggcggggccatcttcctttaagaacgggacagccccgcaaggcgaggggtggggagcgctccgccgggatgggatgtggcgcctttttccgctcgccctcgcgccccccccgccccgcgcagctaaattccggcggaggggcgagctggcaggccggctcctcccactctgggcagcggggtcccgcgtcccctcccccactatttggcagcgtctgggggtctggggcagcttcgttcattcacccgggggagttgggtttccgggaagggtcggaagctcctccctcgcttcctggtgggtaatggggtggtgcctttgactccgggggtggaaaagcgaccccacattcaaggacgccaatggcatgttgagctttcccaatctaaaccaggtgcgtggagggaagcaagtgcttactcccagcttgaaccctgagcagcggttctctaactttagtgtcctgtgggcgacacctgggaggcggttaggaacgctactcctagggcccttcgtaagacctgctgagcctcagggtctgggatagagcctgggaatctgcgctttcaccagcttcccaggtgattcaaacgcagtggctcacggaccccactttgagaaacgcagactgggctgtttgccttcagaagctggactggaaattggtattttgaggagaactgaatccactttgcaaagaatgtatgttggacaaagacaaagtatctctgttgggagacgttgttcactgaggatttagcaagggagagcgtaacttgagtgtttgaagccgtctcgttcaaccgatgggggttgtgaattttgtgttcagagcgtcagaggacttgcaggtgaaatagcttccttttggattactcccacaaagctcagacactttgagacatattcgggtaattatctgctgataccagtagtaacaggttatactaagatgtcagttcctaagatctgtcacacagcgaggttgtggtgcggatagcataagtgtctcttgacactgtagtttatatgtaatggttgtaattcagttttaatgatgagtgaagctcagacttaattttctctcttattttgaagtgagttttctgcttcaaaggtgttgtgcaaaaaaaaaaaaaatagactgtattgggggggttgacacaaacctgaagtacacctttttctttctcgaagtctgtaaaagttacagatttataaaaactgaaggaatttgggctacagaattttcattggtgcttgctatcctcttccctagtcatttgttgcccagggaacaaaaatagcaattgtttgtatgctgaagttttgtgcttcagtttattttggcctggcatgtgaagtttgaagattttgaggttccgaaatattttttttctgattgagtcaaaattggaagcttgggctagttttcaggatcttgtagaaatttcaggatttctctaacggttctgcacctggaaacaaatataggcctgatggggagtgggagagagctctcgttctcctcctcgacaatgagttttgtgtgttcattgacattctccttggcgttcctgttatgcgggtgtttatgaccctgggcacccaaggaaatttgcttgccagagttttacttgttagaggtaggtgaaagtacttttaagtcttgtgttatttatgtcttgacagaattatgaaatctgtttgtctcaaagttctgttggctcttactagttgactttaggaatttggggtccactgttaagtctctttagattctcgaatttaccgtggtctgaacttcaacatcgaggttgctatttctgttttatcattgactcaacttcaagccaggttatcagggtaagttattcctctttttcttctaaggctcttcattaaaaatagtaatatgaataggaattactttgtttgtttgtttttcgtttgtttgccaccacacccggctaattttttatttttagtaaagatggggtttttccatgctggtcaggctggtctcgaactcgtgaccttaggttatccgcccaccttggcctcccaaagtgctgggattacaggcgtgagccaccgcgcccagcctatgagtaggaattactttgtggtgctgttatacatgtgaaaaaggatttgcgagactttgggagtctgaggtggaataatcacttgaggctaggaattcgagatgagcctgggcaacatagacccggtctctacaacaacagcaacaaaatgagctgggcatggtggtacacacctgtggtcctagctactcaggaggctgaggatagcttaggccgaggagttggaggctgcagtgcccaatgattgattgtaccactgcactccagcctgggtgatagagggagaccctgactctaaaaaaataatgaggctgggcgctgtggctcacgcctgtaatcccagcactttgggacgccgaggtgggtggatcacagggtcaggagttctagaccagcttggccaacaaggtaaaacccagtctctactaaaaatacaaaaattagccgggtgtggtggtgcacgcctgtaatcccagctactgagggggctgagacaggagaatcacttgaacttgggaggtggaggttgcagagagccaaggccatgccactgtccagcctgggtgacagagcaagactcgtctcaaaaaaaaaaaaaaaagaaaaaaagaaaaaggacttgttgagaatgtgatatgcaatttgagtatcttgtgtgtgttttttgttttagaattttccatttctttgaatgggactggatggtaggtgagggggaactttttaagagtcccaggccgggcacggtggctcacgcctgtaatcccagctctttgggaggccgaggcagacggatcacctgaggccagaagttcgagaccagcctggccaacatggtgaaaccccgtctctactaaaaatacaaaaattagccaggcatggtgatggtgcatgcctgtaacctcagctactcgggaggctgaggcaggagaatcacttgaactcgggaggtggaggttgcagtgaacccagatcacaccactgcactccagcggcgacagtgagactctgtctcaaaaacaaaacaaaagaaaaaaccagtcctcttaatgtttaaaaaaagttgctgtaacactgtactggagaatttgtgagagcgtacactggactgagagaaacttgactaggagggaacgtaggacagttgattagaacacctgaacacttctctttgggcaggtgaatttggagtgcttgcaatggcaattgtatgcacttccatgggaacgctttcagattgctcctgaccccactcagattggtgactagagtgttactgggaatccttttaaaaattgtttttgtaggctgtgcgcggtggctcacgcctgtaatcccagcactttgggaggccgaggcgggcggatcacgaggtcaggagatcgagaccatcctggctaacacggtgaaaccccatctctactaaaaatacaaaaaattagccaggcgtggtggcgagtgcctgtagtcccagctactcgggaggctgaggccggagaatggcgtgaacgcgggaggcggagcttgcagtgagccgagatcgagctactgcactccatccagcctgggcgacagagcaagactctgtctcaaaaacaaacaaacaaaacaacaacaacaaaaaaacctttcgtagaggaaagaagattcttaagaatttcagtatagtgtaccccaggagattgatttttgcagatgttaattatgctgttgaaaaatagtctttctttcacacattttgtagtattgtcttttctaggtgtaagaagtagaccttatgtggttgagtggatataaatcctccaacttgttataaacagtttgtttgggagaaatagccaaggggatttccctttaaatcgaggacgctaaatggattctccctggcttcgagaaactctttgttgtatgctttatcttttactttgattcatgactgaccagttcttacatcaaacatttttttcccctttgaagtaagagaagagatacttaaaaaaaaaaatgtagtctagaaagagactaggaatagaacactgctgacttgttcttataccaagagctggaggcataaacagttttaataaaaaagaatactttgtatcttttgatgtaacttccctttagagattctgtttcccctgtcttaaattctcaggctatttctgattgctgtttaaataattggtagttactatttgagtcatgcttcttaaaaaaaaaagatataaaaattcgccagctcagctttcatttaattagtatcaaagaaatgttatctgtggcagtgaacattagtagcttgttccagggtttattgtaggtttgttcaagtcagtactgcccatcttggcacttaggttcttggaatacagaggtggataaggtttgcccctcagggcttatggtcttctggggatgaagaaggtccagacgcaggaacagaattttactacagtcatgatacgtgttatcatagttgtataaatcataaacagatatcccagttgctgcctcttgtctagtcatagtttctcctttcactctcaactgtcctggtttggaagataattgtatgtgttatgaaacaatgggaacattgaaaagagacatttacctctgcctggcagagatcagggaaggcttcctggaggaaggtgctttctgagctgaatcttgaagggtaactaggagttaggccaatcacagagggcataagcaggagctggtgacaacacatagcaggagagaaagagtcagagtgggtgagagggagtgtgtgtatttgcaacgtgtgggaattaggtatatctacaaattattggaacataaagtttgtagagtgtcactgtggatgggtagagaggcagagaccagattgtgagggttccatatgccaggccagtgagcacctactctgtgccagacattgtaggcattacttacattgtctctaatctgtccaacaactcgagaggaagacatcagtatccttcaaaagagaacctaggttcaggttgggttgtaattgccccagtttagaatgtaaaaatttgaatctaactctagatcctgttctttaccggtgggccagtggactttggaagcttcagcttttgcagtatgtgattaaggagctgttgaaggattttatttgctttctattattattattactattttttgagacagggtctcactctgtcaccctggctgaagtgcagtggtgccatcacagctcactgcagcttccacttcctgggctcagatgattctcccacctcagcctcctgtgtagctgggattacgggcatgagccaccatgcccatctagttttttgtatttttttgtagagacagggtttcaccatgtcgcccaggctggttttgaactcctaggctcaagcaatctgcccaccttggcctcccaaagtgctgggattacaggtgtgacccactttacccagccatatatattttttaaattctttaaagagatgaggtttcactgtgttacccaggctggagtgcagtggctatacacaggcacgatcatagtgcactagagcctggagctcctgagcgcagcaagtgaccctcctgcctcagtctcagctgagactataggtgtgcaccaccgtgcctggcctgttgaaggattttagagctgaaagtgatgagggcaggtttgctttgctgggttgacctcagtctataacatgtaagttctaccagagcagggatttggtcttgtttactgtgaatccctagaattgtgtctggcacaaggtacgtgttccatgtgtttgttgaatgaaggatgacaacagagtcagaatggatttgaggaaagcaggactggatggagggataaatattaagaggctgttgtgttgggtcaggtaagagactggttttgggacttggcggacagatgagcgagaaagatgacacctgcgtttctgaattaggtgattatacaggctgtcaatcaaggtagggaatacaggaagaagagtgggtctggagaagaggtgaattagagttgccaattagatgaattaagagtagagctgaattagagtagataatgaaggggtatagtcagtacacaactgaatatttgaatctgaaatttgggggagaagtcagagctagaggtagagattaggtagttatcagaatttaggtagtagctgaaactgagatgataatgttacccatggagaatggaaaatctgaaaagagaagcaaagaataggaccatgggaaataggggttttattttagtaccttctccaaaccttgactttggtgctgaggtcttatgttcttccatagagagtaccttccgcagcagacctatcagacgagatcgggcacattcagggtggtatggctgtagacagcagcatcgtatcagacttctttatgttttgcttgtgacagcagtacttggctatggcagttaaatggactgtaagatgttagcttgatttggagtaccctgagtagctgcacaggtagacaaagtacaaagatattgacagcttttttcttcctttagaagaataacatatctaaaacaactcttaaagcaagagagctgcagttgcacactaagaaaatactgcaatactgccatgacttggttataggtgatgctaacataaatgggatattctgtttctcattgcaccagtcatgcagaatcatagcatcatgtgccagatggcagaacgtactgtggcagttaacaccacaaattaacaacacagtggcagaaagcaccgtttaaaaatatgggtacttggccaggcgtggtggctcacttctataatcccagcactttaggaggctgaggcgggcagatcacctgaggtcaggagttcgagactagctctagtctctactaaaatacaaaaattagtgtgtgtgtgtatatatatatactaatcaaacttccttgggaaagaaaatgtgaatgcatttctgtgtcatacatttcttgtgcagcactatatattctgtggtttagcagtattaacagcatcaagctgaacagtaaccagtgttgctaaggtctcgcatactataccatgtatgctgagaagatatgcatccttagaattgagaattagaacatttcagttaattgcagtaacttttcagtaactagatatatgtgtaatttgatttctgaagtaattttaactgtggaaaaactaagttgtcaccagcggtacctcatagcataactttagcccatgatatatggatggatggatataaatggaaattgcacactgaaattaggacgtttatatttcttcaggtattagaaaactactcggatgctccaatgacaccaaaacagattctgcaggtcatagaggcagaaggactaaaggaaatgaggtttgtattgttcttgttgcttaacatgagggtttcataggatatgtgtctttctgtagttgtagtgatatgagtaagtacacctgtgtatgtatttgtgcttctgtgtctggtagtgagatggaactatccatttcccaaattgtgtgtcgtctcagtggagggtggcagtgggtgaacatccatttgttttcatttagaggtgcagtggctttccccatctccttgttcttccttaaatcttggcatagagcttgttttttgtgtaaggagtcagggcacattttctcttgtgctgttttggaagtttcagacctgatagcctctattgtgcctaacgctacccttttctctatgccgtatcactgaagttctttcttttagaataaaagaacagtggtctcatcaacataaaaaaccactgacttttttccccttactaattgcagtcatatatgatgtgaatttactaaattttgaggtgacctttattttccaaatttatggtgtagttttcctggagaagtaacaagttagaaacatagaatttgcaggcttgaaagccaggactatctttcatctttctttttcctcatcctaacttcaaacttaaaaaaaaaaaaaaaaaaagctgggggtagtggcccatgcctgtaatcccagcactttgggaggccaaggcaggcagatcacttaggtcaggagttcgagaccagcctggccaacatggcaaaaccccgtctctactaacaatacaaagattagccggcatggtgacgcatgcctgtagcctgtagttccagcttgggaggcggaggctggagaatcgcttgaactcaggagacggaggttgcagtgagccgagattgcaccactgcactccagcctggacaacagaataagactgcatctcaaaaaacaaaacaaaacaaaaaacaaagaaagtacttaaatgaggaaagaggagagcactacacagtccttgcctgggactcagagcaaacttcatgtttttgctagtcaaacttagctgctttaattgaccttttagggtcaaaaggccttcactttccagttgtcagttcaaacgttctcaagttgatgttttgtggggagggaagattgagattgtctacatcacatttatttgacttgtacttatccactgtgtagtgttataattgtgctttatttttgtttttatgggctatttcccatcatgctgctgtctgcactgctgttggaccactttgcctatagaaggtaaatgagtccctttgggacatatggaattgagaaccttaacttgtttctgcttcttgttcttagaggaattatgaagcagtcatgatggctcatgatgagtgagcagctctgtaatttgtagacagaggtataatatgtaggagtcacagaagagctgtgccagcatgctgttccccttgtagcagagatgctagcacacccacttgatactccagattttgcatagggtttcttttagagattggttcttggtgaaaaattttttagcatccagtgtgttccaaggcaaaataagtaatagttttttaatggtttttttagactcagaatttatttttaacactgcataaattagggcttctagttctgaaaaatgcaaagaggcttacttaagctatttatatattttttaacatgctggggagagggaagagagggtgcacaggtgactcctagcactaatatgctagtgccaaactcagttaatattaataatggtcatttgttgatatttttggtagcttttctatttaaagattcagtaagtagcatcctttgcactgaattgtcacgttttgtaacctgctgttgtggcagggaccatgaaacaacttagtatgccattgtttcagtttattttttaagcattactgggaactaaatccacttgacttactttttgcatttaggtttaaataattgttcctgggtagatacagaataaaactcaatctccccacttccagcagagaaaaaacaaatgaaatactgttctttttgtgtacttactagaaaatgtttaactggaaaaaaagttctgcttgttttattggcacagcaccattgattctgtgattctttgtcatagtattctgtggcagtttctgagtatgatatgtagattgaaatatagaggctaggaaacttttaatagtaaaattttactaaaaatttattaacttattaaaatataacttgaaaaaattgtgaggtttttctaaatttcttggaaatttgatttatattgtcaaaaagcactgaagaagtgttagttatggatttcgggtatcacataatgtttattccagagttttctgagtgtgatttatgtgaatttcatttggttattcttttactattttcacagtgaaattgtcatgagattttttcttctgtatttcttgcttagcttcttctcatttaagaatgagttggagggattaggtctttaagtaggcagatggattgtataaccctcatccattcttttgtggttttacagtgggacttcccctctcgcatgcctcaatgctatgctacattccaattcaagaggaggagaggggttgttttataaactgcctggccgaatcagccttttcacgctcaaggtaagtgatatgaactctcttttggtgcagtgattcttggacttttaatgtgcataaaaatcacctggtaggtctggaataggggccatgaatttgcatttctcatatgcagtcaggtgacactgatgtttttcttttttttagacatagtctcgctgtgtcacccaggctggagtgcaatggggcgagatctcggctcactgcaatctctgcctcccatgttcaagtgattctcccacctcaacctcccaagtagctgggactacaggcacatgccaccatgctcggctaatttttttattttttttaatagagacggggtttcaccatgttggccaggctggtctcgaaatcctgacctcaggtgatccacctacctcggcctcccaaagtgctgggattacaggcatgagccaccgcacctggccagatgctgttggttctaaatggcactttgaggtgttctaatatgaatcagatattagaaattatttagtcatagcagctcttgtttgtgtgttcatcttttcttgtctatatctttgtagattgtacaaaactgaagcataactatggggataattgcagatgtgcctttttttttttttttttttttttattctgagatggagtctcactctgttgcccaggctggagtgcagtggtgcgatctcagctcattgcaccctccacctcccaggttcaagcaattcttctgcctcagcctcctgagtagctaagagtgcactaccatgcccaggtaatttttgtatttttagtagagacggggtttcaccatgttggccaggctcgtcttgaactcctgaccttgtgatccgtccgccttagcctcccaaagtgctgggattacaggcgtgagccactgcacctggccacagatgtgccttaattaggattttgttgtagtaatgatgtgaaggataaattactggtcagctaatgtaagacctactctatggaaaataactgaaatgtgaacatatttgtggaaattaagtgacagtaattataaagtaagagtacttaaatcaggtagagttcataataaagcttaaatagggccgaaatgaacaggctaattatttttccaccatttgtgatatatatggtaatcatttagaccgggggtctgcaaagtttttctgtaaaggaccagaaaatcaatgtttttttgttttgtggatcatactgtctttgtcttaaccactcaggtctgccattgtagtaggaaagcagccatacccaaatgaatgggcatggctgtgttccaaaaaaaaaaaaaatttatttacaaatgtttgttttacttacgaaaacaggctgcaggccagatttgatttggggctgtactttgtcgacccctgatttagacataagatgacttgtcgacattggagaaactgaaaatttgatgctgaccctttcgttcttccatagtgggttataaattttagcagtcagtacaaactttttcctttaagttttgttttcttgatggactgtattcaaaataaatacctgaacaaataccaactatataacatgaagccataaaacttggtctttatatataaataaagtttatcttggggtcagatgtctgtgctgttttctatatttttttatatccaatagtttggtctttttcctttcagttttgtatgcttttcttgtaatcgagccttggaagagacagagccactgagcccaaaacctagctttgtggtcggctgtggtggctcatgcctgtaatcccagcactttgggaggctaaggcgggaggattgcttaaactcaggagtatgagaccttgtctctattaaaaaaaaaaaaaaaaaaaaaaagccttgcgtggtggtgtgtgtgcttatagtcttagctactcaggaggctgaagcaggagggtagcttggagatggaggctgcagtgagctgtgatcacaccactgctctccagcctgggccacatagcaagaccctgtctcaaaacaaaaacttagctttgtaacctgggagggatttaacccttctttttggtggaatatgcatccctggcattgagtcagtccttaataaatgatagcctttatgatgatctgaggtttatcattcttaattgcctgttaatggcatttttctattaatattatctattttttgagatagggtcttgttctgtcacctgggctggagtgcagtatcatagtcacagctcactgcagccttgacctactaggctcaagtgatcctcccacctcagccttctgagtagctaggacttcaggcgcataccactatgcctggctaattttttgtattttttgtggagaaggagttttgccatgttgcccaggctggtctcgagctcctggggtcaagcgatccactggctttggcctcccaaactgccaggattacagacgtgggccactgcacctggcctattattttttaatttaatattaatttatatttttagaaacagggtctcacactgttgtccacagctggagtgcagtagtataatcatagctcaccgtagccttgaactcctgggctcaagcagtagtcccacctcagcctcccgagtagcgtacaccatcaccccagctaatttttaaattttttcctagagatgaagtcttgctatgttggttaaactggtctcaaactcctggcctcaagtgatcttcccaccacagcttcacaaagcactgggatggattacaggtgtgagcaaccatacctggccctctattatctcatatatagcttattgttacatatgctgtaattatatatagttataattatttaatacatatatgtttattacaaatatgcctgttaatggtatattctgtttttaaaaggaaggataattacttttttctatgagtaccttaagggcaggaactgagttttatttgtgtttgtaatttggctctgggcagaattcttggcatagtacgtgctttatgtgtgaactgaattatatttcttcatcttaattttacaggtgtgagccactgcaccaggccccttcatcttaattttaatatatctttgaataaacaccattgtatgaacctgctgtaagcttgggagtggtctgttagtctacagcttgtgtctgagatgtgctaattgaatatttgctcagtacctcatcttaactgcctttggctttatgttgcttatccttcatagtatcttgttcattggccttttacatccataggcatcacttctctgatattcgttgtgctcttttaatggattaatggtttgcttggttggttcctctagttagactgtaaactccttgagagcagagtctgtattttattaattacccacagtactaggtacatagttgccttcaataaatatatatttaatgaacgaatttagtgaataatggctacatttttgtacttcgttattatttatttattttttttttctgagacagagtcttgctctgtaacccacgctggagtgcagtggtgtgatcttggctcactgcaacctccaccgcccaggctgaagtgattctcctgcctcagcctcccgagtagctaggactacaggcgtgcaccaccatacctggccaatttttgtatttttagtagagatgggattttactatgttggccaggctggtcttgaactcttgacctcgtgatccgtctgcctcggcctcccagagtgctgggattacaggtgtgagccaccgcgcccagccttcattattcttttgacatttgatgataaatactgtttatgattttctttttctttttttttttttggtagagacagtctcgctttgttgcccaggctggtcttgaacttttggactcaagcgatccacccacctcagcctcccaaagtgttgggtttacatgcatgagccacctcgtgtgtccttgttcataattttgatgggctgggcgcagtggctcacgcctgtaatcccagcactttgggaggccgaggtgggtgaatcacttgaggtcaggagttcaagaccagcctggccaacatggcgaaaccccgtctctacgaaaaatacaaaaattagccgggcgtggttgtgcacgcctgtaatcctagctacccaagaggctgaggcaggagaatcactttaacccgggagatggaggttgcagtgagctgagatcgtgccattgcactccagcctgggcaacaagagtgaagctccatctcaagaacagttttgatgaaattgtccctagatttgcatctggcatctagctcatatctcagagccagaatgaaggatgcttacctctgggtttggtaaattttagcttggttaattatgtgtgtgccttaatttttttgacctattataaaagcaatatacgtaaatgcaacagagaaaatgaaagtaatccataaaattctacctgtggccagctgcgatggctcatgcctgtaatcccagcactttgggaggttgcggtgggtggatcacttgaggtcaggagttcgagaccagcctggccaacatggtgaaaccctgtctctactgaaaatgcgaaaattagctgggcatggtggtgggtgcctgtaattccaggtacttggggaggctgaggctggagaattgcttgaacccgggaggcagaggttgcagtgagccaagattgcaccactgcactctagcctgggtgacagagactcttaagaaaaagaaaaaaaaattcagatacctgtaacctaaataattaatatttgaaaaaatttcatcattgcttctttcattcagttaatatattttgaaccacttgccatggtgttatatatagacatgtcttatatatgtgtatatatatgtgtgtatttatttattttttgagacagagtctcgctttgtcatccaggctggagttcagtggtacaatcatggctcactgcacccttgacttcctgggctcaagcaatccttccagcttccctagtagctgggactacaggcgcatgccaccacacccagctaatttttgtagtttttgttgaggtgggaattcactagtcttgaattcctgagctcaagcaatcctcccatcttggcttcccaaagtgctgggattataggcatgagccactgtgctcacccagttttttatttttagatacagggtctcgctctgtggcttaaagctagatggtgcagtggcaccatcatagctcactacaaccttgagcgcctgggcttaaggaatcttcctgtcagcctccccagtagctgggaccacaggcatgcaccactgcacctaattaaaaaaaattttttttatagagatggagggggtctcattttgttcctcaggctagtctcaaactcctggcctcaagcaatcctctgcttcagcctcccgaagtgctgggattacaggtgtgagccacggtgcccggccccttattctttttgaaggctgttttaagaattccagatttccagccatgaatgtgtgattactaactagtctcttgttatatgcctcatcaacaccacacttctcccagaagttgtgcaggcatttagtttattgttactcaggaatggatgagaaaggatatcaaagatctgaaccagctgattaccatcttggtcacttgagaactcaggtctgtccaataaacaccctaatccaaggtggtgttaaatacatatatatatatttttactttacgtttatttattttgaaaaatttcaaacctatagaaaaattgaggcagtaccatagtcttagtccattttccattacttagaatatccaaaagtgagtaatttataaagaaaattaatttatttcttacagctatggaggccaaggtcgaggggacatatctggtcagcgttttgccatgttggtcaggctggtctcgaactcctgacctcaaggcctgccttggcctcccaaagtgctgggattacaggcataagccaccgtgcccagccacctctgagcactttagatagtatgtcttaagaacaaagacatagcccggcgcagtggctcacgcctgtaatcccagcagtttgggaggctgagtcgggcggatcaccttaggtcaggagttcgcggcaaaaccccgttactactaaaaatacaaaaaattagctgggtgtggtggcgtgcacctgtaatcccagctactcgggaggctgaggctggagaatcacttgaacccaggaggcagaggctgcagtgagccgagatggcaccactgcactgtagcctgggtgacagagcaagacttggtctcaaaaaaaaaaaagaaaaaaagaacaaagacattttcctatataaccacaatgccgttatcacactcaagaaacttaacattgatatgattgtgtataatacatagtccatattcaaatttttctctcatttcaaaattattctttgtggcctaaaatcctgtatccaatcatgatatttttgaacaatccagactagttgttgtatagaagtaagtagtttgttttttttgttttgttttgttttgttttttgagacagggcctggctccgttgcccaggctggagtgcagtggcatgatcacggcttactgcaacctctgcctcctgtgctcaagcaatcttgtgcctcagcttcctaaataactggaattagaggtgcgtgacaccacgcctagctaatttttgtatttttaatagagatggggttttgtcatgttgcccaggctggtcttgaactcctggactcgaagcaatcctcccacctcagcctcccaaagtgctgggatttataggtgtgagccaccaggcctggcagttaagtacattttttaaggactaataaaaatgtagaaatcttcgttatttccggaatcctttatgttttactgccagtactaatgtagtaatgccagacagtagtcatgtctactgttccaggttgtccaaaggattcagcagcaaaggatgaaagtggtgggaagttttgcatagtggtcgaccaagggctagtttggtgagtgtcttgcctatgataatggacaggaagacaccagttattttattttatttttattttattttattttattttaattttattttgtgttgtgttgtgttatctttgagatggagtctcactgtatcacccaggctggagtgcagtggcgcaatctcggctcactgtaacctctgcctcccgggttgaagtgatcctcctgcctcagcctcttgagtagctgggattatatgcgtgagccaccacacccgactaattttttgtatttttagtagagacagggttttaccatgttggccaggctggtcttgaactccttacctcaggtgatccacccaccgcagccccccaaagtgttgggattacaggcgtgagccaccacacccagctgacaccagttatttaactcacatttctctgttttccttttaaaggtagtagtgacacctttgaaatcttttggcattttctttgcctgttctcccttatgtgttaaggataagcttacgtgcagaatggcttgttaagttttttctcctccgtacttggaaatctcatctggtgggacattagggtcagaattttgtatattatatattatatatctatcatgatatatataatgtattttatatattatatattatataaatatcatgatagatatataatatataattatatgttatatattttatatttataaaataaaaataaaaaattgcaattattttcaaatagtaaaaccacgtagataaaatataattctggccaggcacgtggctcatgcctgtaatcccagcactttgggaggctaaggtgggtggatcacctgaggtcaggtgatataatatacaacagatataatatgtctattatatattatatataatgttatatagatatctatattatatataatatattaatagatatattaatataatatatattatatattatacagatatctataaatatattatatataatatattatagatatatctatgtatattatatcacctgacgtcaggtgatccacccaccttagcctcgcaaagtgctgggattacaggcgtgagccacgtgcctggccagaattatattttatctacgtggttttactatttgaaaataattgcaattttttattttattttttggttctggaaacatttgtgtggacttacctatgattgtcaggtttactgatttgctggagattttttgggcatgacaaagggtttcttctttgataaaagtttttctgggtaatgtgatggtacaggttgagtatcctttatctgaaatgcttgagacatgaagtgttttggatttgagaatttttagcatcttggaatatttaccacatacatagtaaggtaccttgaggatggggcccaagtctaaacacagaattcatttgtgtttcatatttatcttatatgcatgaaacaaagttgtttgttttcttttttttttgagacggagtctcactctgtcgcccaggctggagtgcaatggcatggtcttggctcactgcaacctccgcctcccaggtccaagcgattctcttacctcagcctcctgcgtagctgggattacagacatgaggcaccatgcccggcaaatttttgtatttttagtagagatggggtttcaccatgttggccaggctggtctcaaacccctgacctgaagtgatctgcctgcctcagcctcccaaagtcctgggattacaggtgtgaaccaccgcacctggccccaaaataaagttttgactctgtgtgtgtgtgtgtgtgtgtgtgtgtgtgttttggagacagagtctcactctgtcgcccaggctggagtgcagtggcatgatcacagctcactgcaaccttagcttcctgggctcaaatgatcctcccactttagcctcccaggtagttgggactacaggtgcgtgccactgtggctgagtaatttgtgtgtgtgtgtgtgtgtgtgtgtgtgtgtgtgtgttttaatagagatggggctttgccatgttgcccagcctggctcttgacctcttgggctcaagccatctgcccaccttgacctcccaaagtgctaggattataggcgtgaaccaccatgcccagcctttgactgtgttttgatggcaacccatcacgtgaggtcaggtgtagaaatttccatttttggcgtcaggttggcactccaaaggtttcagattgtggagctccttggagttttggattagggatgctcagcctgtacatttgacagtttatttacagatgcttgcatcagtgcttggagctagtcctcagtggtgggataggtgaaaattatctctactttgagttcttgatttgaattcttttttcttaagcttttcctaaagtcatgtgtcagtgttgattattgcccggttagaggtaggatttgtattgtttttttacacttggaatttcctgttgtcataagatcactgtgaactcccttgtagtgttgtacattcttaggactttcatgctgaaatactatgcttttataaaatggttgttgtgtctttgctgagtttaaatagggtccaggccaggcatggtggctcatgcttaccctgtctcaaaaaaaaaacaccctcaactaaatatagttaaataggccaggctcggtggctcatgcctgtaatcccagcactttgggaggcggaggcgggcggatcacctgaggtcaggagttcgagaccagcctggctaacacggcgaagccctgtctctattaaaaataaaaaaaaaacctagccaggtgtggtggtgaacgcctgtagtcccagctactcgggaggctgaggcaggagaatcacttgaacccagagacagagtgagactctgtctctcacacacacacacacacagataaataaattgggttcataaatggtgattccagcactcactgtcaggtataacttcagtctttttttttttttttttttttttttttttttttttttttttgagacagagtctccttctgtcacccaggctggagagcagtggtgtagtctcagctcattgcaacctccaccttctaggttcaagcagttcttctgccttagcctcccaggtagctgggattacaggtgcagaccaccacgcccaactaatttatttatttattattattattattattattttttagtagagatggagttttgccatgttggtcaggctgactttgaactcctgacttcatgtgatccacctgccttggcctcccaaagtgctgggattacaggtgtgagccactgtgtccagccaacattattcacttttgttgttacataagatgtcacggccaggcatggtgggtcacgcctgtaatcccagcactttgggaggctgaggtgtgtggatcacctgaggtcaggagtttgagaccagcctggccaacctggtgaaaccccgtctgtactaaaaatatgaaaattagctgggattacaggcgggcacctgtaatcccagctactagggaggctgaggcaggagaatcacttgaacccgggaggcagaggttgcagtgagctgagatcgtgccattgcactccagcctgggtgacagagcaagactgcgtctcaaaaaaagaaaaaaataaaaaagatgtcagttatggctatttgtactttattatacttcatgtgatgatatatggttcagcatcagggtcttttttcagttaagttcagttgaacccttttcctgtttagaatattttttaaaagtataaaaaaacttaataaaagaaatggatggctgggcatggtggctcacccctgtaatcccagcactttggtaggctgaggcgggcagatcacctgaggtcaggagttcaagaccagcctggccaacacagtgaaactccatctctactaaaaatacaaaaattagctgggcgtggtggcggccgcctgtaatcccagccacttgggaggctgaggcaggagaatcccttgaacccgggaggcggagattgcaatgagcctattgcgcaactgcactgtagcctgggcgacaagaaggagactccgtccctcccataaaaaaaagaaatagatgactacatttaaaatatcttccatttaaatccatagtttacaaataaaggaaaaagcagtggaggaagagagtgagataattacttcatttttacaatgttaaataattacaattaaaatttttgtgtacaattccacatttaatagcaatttgcaaatgccttattgccaggtgtggtgtcttacgcctgtaatcccagtactttgggagcccaaggtgggagaattgcttgagccctggaattcgagaccagcctgggcaacatagcgaaacttttgtctctacaagaaataaaattagccaggtgtggtagcctgcatctgtagttggaggtactgggggagctgacgtgagaggattgcttgagcccaggaggttgaggctgcagctgacatcaagccactagactctatcctgggcgactaattgagaccctgtctcaacgaacaaagaaacaaaaaaaacccaaatgatttacttaccattaaataccaagaaaagaatgactggagtaagcttagatttagatacaacaaaatcatggagcttatcatttgaaaggcatttttgacttttcataggtgtgtagcaagcaaagtggtccttttgaaaaatgcaagtcacatcatgtcacttttctgcttggcctttgcctacttctcgaatggttctcctagcacattctaactggtcattattcattgtgtttcagccattctggccttcaacctatttctcaaacaccccaatcttgggtatactttagggcccttgcatttgctagctcatttacctggaaaattctgcggtaacttcttgcacataataggtgctaataaatattggctgcatgcaaccaaaaaagctggcttcggtagtagaagtagtagaagagaacattaccaaagtccttttttttgagacaagatttccctctgttatttaggctgagtgcagtggtgccatcacggctcactgcagccttgacttcttggactcaaatgatcctcccacctcagcctcctgagaagctgggaccacaggtgtgtgtcaccatgcctggccaatttttttatttgtagagaagaggtcttactgtgttgcccagaatggtgtcaaactcctgggctcaagtgatccacctgcctcagcctcccaaaatgctgagattataggtgtgagccactggtccagcctcttaccaaaatctttttttttttttttttttgagacggagtctcgctgtgtcgcccaggctggagtgcagtggcgggatctcggctcactgcaagctccgcctcccgggttcacaccattctcctgcctcagcctcctgagtagctgggactacaggcgcctgctaccacgcccggctaattttttatatttttagtagagacggggtttcaccatgttggccaggatggtctcgatcttttgacctcgtgatccacccacctcggcctcccaaagtgctgggattacaggcatgagctaccgcgcctggccgcctcttatcaaaatcttaaacttgttaattcttgtatctcaccttgcttttatatcagtttttgttatagaatgtgctttctttttaggttatttttcttctgctcagcaagttaactttgaagaatcttttttttcttgccttttttttttttttttgagacagaattttggttttgttgcccaggctggagtgcaatggcgcgatctcagctaacggcaacctccacttcccgggttcaagtgattctcctgccccagcctcccgagtagctgggattacaggcatgaggccaccaggcctggctatttttattttttattttttatttttattttttactagagacagtgtttttccatgttggtcaggctggtcttgaattctcgtcctcaggtgatccacccgccttgacctcccgaagtcctgggattacaggtgtgagccagcgcacccggcctcttgccctctttagagcagttctacataaatctgtggaataatctgctgacgttagaaataaacctttctcagggtgtggccataatctggttcgttgtaattgctgaaggaaaaaactgaacccttaggaacagtttaaacattctaggtggtttttagatatattattcctgttagagttttgaactttgatcatcttgttagaaaaaagaggccaggcactgtgcctcatacctgtaatcccagcattttggaggctgagtcgtcaggaagtcacttgagcccaggagtttggtaccagcctgggcaacatatggagacctcgtctctacaaaaaaaaaaaaaaaaaaacaaaacctgttagccaggcgtggtggctcatgcctgtgttcccagctactcaggaggctgagatggaaggattgcttgagcctgggaagttgcgactgcagtgagctgtgattgtgccactgcactccagcctgggcaacagagtaagaccctgtctcaaaaaaaatgaatttttgcattcatttaaaaatgaatggtagcaacattttagataataacttatgtagtctgtgtgaatctcatcaaatatatgtgatttttaatgcttggaatcctagaattttagtgagggaggagctctcaagttatctaatttactgtcattttacagataaaaactaaacttctgatagatgaaaggatttataccatacatctatatgataattgcatatggctgagttgaggttagaacccaggacccaatctttgatttgatttcttttcattatgccaatttagaataaaattttttctcttggttttctgacctttggccacttcatcttttgaaggatcttgtaagttccttgatatttctcaaaatgtcagttttattctcttcaatgaaagttcttgttaggtgaaagtagcctttcatatccttaaatgtgaacctgttccttaggctggagtttttgtactctccattatattggcatttatagttgttggttttcttttttttttttcttttgagacggagtctgtctctgtcgcccaggctagagtgcagtggcgcgatctcggctcactgcaagctctgcctcccgggttcacgccattctcctgcctcagcctcctgagtagctgggactataggcgcccgccaccatgcccggctaatttttttgtatttttaatagagacggggtttcactgtgtttgccaggatggtctccatctcctgaccttgtgatcctcccgcctcggcctcccacaagtgctgggattacaggcgtgagccactgcacccggccagttgttggttttcttttctgtgccagattgagtgatatatggtggtactaagagcactggaataggagtcaaggactgaggtacagcatagcacctcatgtattacttggtatctccacttgtctctaacactgaagaggtataattggttgtttaaaaactgtgggtgtaaaacgctagtatcccatgaaatggaactgcagaatataagtggatgactctgaaactgcttttgaaacaagcatgagggctcagtttctccatctctcgtgggctccaccatcactgtctgacatcctgatctcctaaggcatctttcctccatcccagagctctgttgaaaatctcttgggctaaaaaccagtacagaccttctgatactcacgttctagcctttttagattgttgtgtgtgaagagtaagtcagctgtggatatttttctttcctattttgtgaggcatttggtatttactggaggctgcctgttttgttgcaaaccttgttccactgtgtactataggaggtctgctcagaaagcctagttagtagagcagtaccatttgctttggtcaattgtagcagcagtctgttttttttttttttttttttttttttgagacagagtcttgctgtgttgctcaggctggagtgcagtggtgtgatctttgctcactgcaacctccgcctcctgggttcaagcgattctcctgccttggcctcccaagtgggattgcaggtgtgtgccaccatgcccggctaattctgtatttttaatagagatggggtttcacccccaggctggtcttaaactcctaacctcaagtgatccacttgcttcggcctcccaaagtgctaggattacaggtgtgagccaccgtgcccggccagcaatctggttttaaaggaggctttgacccctcatttggtaaaaggttccttctttgactaattcccaaaggacatctcgatctgtcttcaaaagaaggggtattccgttgtcagtattcctagctagctctgggagaagagagaacttgattgttttcagggccctggtcagagtctggttttatgcccaagggatgaactgccttttgtccttctacctcctgaagttcagagccctgtgaaaatgaagtggtaaaggtcaagtagcagtagtttgaaaagcaccagcactgggacgattttgtggtagcctagcagagtgggcaggatgcttacttcagaggtgctaaagatgtatttttttttggaacaagaaggttataaatgtttctattaagtttgattttaaagcatgagggttctgggaaaatgagaagattgtacatactctaggcttccttgggactgcatttgaaaaaaaaaaaacttttctttgggtcagccagtatgaaaactgcatttgatctcaatccttcagatcaggcttttggggagagttagttgaagaatttgtttagtctaagaaagttgcttctagcttagctaaatctggaagaaaaaatggaacctgatgtttgagtgctaactgtattccagacagacgttatactccttatattggtccttttgaagcataaatatgtttccaagtcctataataatgaggaaattgcctgtgagagtttaagtaaattgtacaaagtaacacttttggttcagagatttgtttttaatacagagaggacaggttaggaactttgaagcttcagctaaatgagtcagttctcaaatgtttgagaagcatgctcaaggatctggaggaatagcttaattaatttgtacatcatgagaggagtagggagcaaaaatatgtataatttcttctgaatgatgctgtcttttttgatgcagtggtgctaaatgggctttgcttgtatgatacttcttaaatgcattagctaattattttgttttagtcttcttttttgaaatacagatgactctttgagctggttttctttggaaagttatctgtcctgacaattctacttctaaaacttcaactttttttttttagtcttcatttccattgccaccaccctatcctaaattatcccgttatgctggatactgaaatagcttctgcctggtctacttactttcacttcgcccccttacgatccagtgctttgctccttttaatccagtggccagagggatttttttcaaaacataatttgattataacagatctatgtttgatacttatccatggtttcccatggcagttgcagaaaaatccaaaccttgtttggccacactgcccttctttcagtaatttgaattccttaagctttttccagtttcaggatttcccattttgaactctttctcctccactttttcctggccacaggtttcaagagctgacaacttacctcagttcttaagaggatccttcatttatctctaaattggattttcctgtgtccaaaccttacttgttatcacaagtttataattatttgggtgattgtttgatgtgtctctcctgactgggccttaggggcagagaatctgtattattttgttcttgtttatatccctaggagctcttatggtaggtattcaataaatgtttgttgaataaaggcagtggaaaaacacatagaagaggtgctgtggcagcagttctcagtgccaacagttgaattggtttacaatagtaatttttagtgtcaacaaggagatgtgtagtatggaatgtttattagcaagatctttttctcatggaatggaatgtttgaaaacctccaaagtgtaagtttttttttttctcaaaagaaaacagtcatatttggggttacttttttttttgagacagagtcttgttctgttgcccaggctggagtgcagtggcatgatcccggctcactgcaacctccacctcccgagtttaagtaattctcatgccttagccactggaatagctgggattacaggtgtgtgccaccatgcccagctgttttttgtataattattagagatggggtttcgccatgttgaccaggctggtctcaagctcctggcctcaagtgatctgccagccttggcctcccaaagtgctgggattacagatgagagccaccgtgcccggcccattgttacttctgaaatcgaaatcaaatgccatattgattcctgatcttttgtgtatgacctctctctctcttttttttttttttttgctacctctccccgaaagtttttaggatctttttttccacgattatgtaccttgatgtgggtcttttctcgccctttgtgctattaggtctagcaactcatgtgtctcaggtctgggaaatgattttacagtttttccagctggtgcgtaactagctgtttgttctgatactgtcagtatttaactttatgttagaaacatttcataatgcaaatgaaaaatttaagccaggtgcagtggctcatgcactttgtgaggctgaggtgggaggaacacttgaggtcaggagttcaaaaccagcctggccaacatggtgaaaccccttctactaaaaaaacaaaaaaacaaaaattaactgggcatggttgtgcacccccataatcccagttactcaggaggctgaggtacgagaatcactggaactgggagacaggtttcagtgagccgagactgagacagagcaagaccctgtctcaaaatataaataaaatacataaaaaatttaatattatgtatataatatccagcccaggcttttctatttgtcatgccctgtttctttcacatcatagccttactcagatgcctgctgatccttgattgaggtgtgatgcttgagagtcaggctcttaaatactactggcgaattcagtgcattgtggttttgtgacttcacttgtctcttacagaagtggggaagtggtttttacttcgatgcatggttctgaagtagagatgtctatctcctgatgcacactttaaataatccccatgttttccactccatactccatccttgtctggtttaagctcttagcctgtctgcagttcaggggatgaatctgcttggttcttttcagcatctccctctgcaacgcttagatctcatcttcctttgctttgctaactattctctttgcttctccatttgtttctctgtcattgatgacttccaagttatatccccatcctggatattccttttgaacgtcagactcatatattcagttacctcctcagtatctctattcggatatctaatggcatctcaaaattaacatgtgcaaaaccaacctgttccacccttgtgttggctgtataaattagtgggaactccattttttaagttgcttaaatcagaaacctgggagtcatcaattttggagtctgtccctttgctcttgtggcacatgtaatcacgaataaatcctgttggctctatcttcagaatatatctcattttatcactctctctgccaccagagtggtttaagccaccttcatctcttaggttattttagtagcttcctaactggtctccttccttccattcttgccaccttcctcaacaccgaagatatattttatttatttatttatttattttgagacagagtcttgctctgtcaccccagctggaatgcggtggcttgatcttggctcactgcaacctctgtcttccaggcttaagcaattctcctgcctcagcctcccgagtagctggggctgcaggcatgcaccaccatgcctggctaatttttgtattttttagtagagatggagtttcaccatgttggccaggctggtctcgaactcctgacctcaggtcatctgcccgcctcagcctcccaaagtgttgggattacaggcgtcagccaccatgcttggccaaattttttattcctttgggtaaagagatgtattttatttcctttaatttggtaatatagtgagttatgttaatagattctttttttccagtgctcaagcatccttgcattcctaggataaatggtacttcaacatgattttccttttaaatatacattgctggatttaggttataaattattgagaatttttgcatctgtatttacaagtgttacattctaatttcaggccttttccagttttattatcaaaacaagctgtgctgtttttcctctcttgattctcagtagtagtctctttaagatagtgattattcattctttttggtagatcatgcctataagacctgggcatgtatgtttttattgtgggaatatattgtttttactttccttgttatgaaatatataatttattttaaaatatgtatatacagagtttgtgttcctttaaagaataatagctaaaaataaattgcacgcccccacatccaaccatcgtcaaacaaaacatcttttacactctattttatttatttattttcccccacccctctagagtatacacccttttggagcctctgagcattttcctttccctcactgctttagaaacctctattcagatttttcatattaatgattcttttgcttttaacccacatgtgttactgaagtttaagtcctaaataataatttttcctgctttaaaatatatttttatgtcaatgaaatcatactggtggatgtattttctctgatttgctgcttttgcctctcatttctgagcttgatctatgttggtgcatttatagaaatacttcatattttctgctgtgtatcatcttatgctatcaacgtgccatatgatttacctgttcttagcatgtatttgggttgtttctggttcttgctgtaacaaacagctgcatttagtgcttgtgtatgtgtctcctgatgcatgtgtgcattcacttctctggggtgtatatgttgctgggaatgggactgagtattgtgagtgtataatagtatcttgtttttgttttttttccctctcagtttatggcataatttacgtacagtaaaatttaccaccgcccccctgccccgcctttttctttttctgaaacagagtctcgctctgttgtccaggctggagtgcagtggcacaatctcggctcactgcaacctttacttactgggttcaagcgattctcctgcctcagcctcacaagtagttgggattacaggtgcctgccaggctaattttgtagagacagggtttcaccatgttggccaggctggtctcaaactccttacctcaggtgatccacccaccttggcctccccaagtgttgggattagaggtatgagccaccacgcccagccaaattcaccctttttagtgtacaagtatacagctttgtgagagtttgatttctttagttcaaatttgttttaaagttatatttggtattttaacagtgctatttaaatatatgccatatatggcttgaatgcaattatcctagtacagatggtccttgacttatgatgtttttgtgtccctgtaagcccaccttaagttgaaaatattaagttgaaaatgcatttaatatgactaacctgctgtaaatcctaacttagcctaccttaaatgcacttagaacacttaaattagtttacagtgggcaaatcatcaaacacaaagcctatttgtaataaagtgttgaatatcttatataatttattgaatactaaagtgaaaaacaatagttgtatgagtagtcagagtatggcttctcttcaatgcatatcactttcatataccatcgtaaactcaaaaaatcataagtcagggtatgctgtatattttattggtgctaacatacttccattttaaaatacaggaaattcacctttttttgtgtatagtcttgtaagttttgacagatctatatacagatatgtaatccccacccatgattcttttttaatttaaaaaaatatatttttgagacagtctcactgtcacccaggctggaatgcagtggcatgatcgtagctcactgcagcctcaaactcctggccttaagtgctcctcctgcctcagcctcccaaagtgctaggattacaggaatgagccagtgtgccctgccaccaccataattaagatccagaacagtttcatcatcccagaaactttccctgtatccttttgtagtcagcttcttttttcacccccagctcctggtgaccactgatttgttctctgtccttgcagtactgtcttttccagaatgccatataaattgaatcctacattatataacactttgagtctggcgtcttttacttagtgtgaagtatttgagatttatttgtcttgtgatgtgtattagcaatttatttcttttttcttttttttctttttggagacaaggtcttgctctgtcacccaggctgaagtgcagcggcacgatcatagttcactgcaggcttaaactcaagcaatcctcccacttcagcctcctgagtagctgggactgcaggcgcacaccaccatgttcagctaattttttttttttcttggtagagacaggatctcactctgttgcccaggctgatttcaaactcctggcctcaaggaatcctcccacctatgcctctcaaagtgctgggattacaggtgtgaaccattacagttggctagcagtttatttctgtatattgcaggatagtatctcattgtatagatgtaccacattttgcgtattcattcttcagttgatagacatttggactacttcctccttttggctgctgtgagtaatgctgctgtgaataaatatttgtgtgtaagtttctatgtggacatacagtttcattattcttgggtagataaaccttggagtaattgctgggttgggtggtaatttctgtttaacttttaaagaaatagctaagctgttttccaaagtggcttcaccatcttaaattcaagtttttgttttcgttgtatttgaggcagagctttactctcttgcccaggctggagtgcaatggcaagattatattatagctcactgcagcctcgatcttccaggctcaagcgatcctctcacctcagcctcccaggtagctgagagtacaggtgtgtgtcaccatgcctggctaagttttgatttttagtagagataaggtctggctatgtttcccaggctggtcttgaacttctgagctcaagcagtcctcctgccttggcctcccaaagtgctgggattgcaggtgtgagccaccaagcccagccaaggtttttgtgttttagtaaaatttctgctcttcctggcaatacttttttctgaaatttactttgatattgatatagtcactccagttcttttcagtgcttagtttttgcatggtatattttttccatccttttgtgttatactgtctgtttcattatatttgtagttggaccttgattttttttttttccctaattcttttacttgggatgcttggacctaatgtgtgtctagtttttcctaatgtgtcttttacttgggatgcttggaccatgtgtatttaattattgatatggttgggttaagtccaccatctagctatttgttatttatttatttttagagccaaggtcttgctgtgccacccaggctggggtgctagtggcatgatcatggctcactgaagcctctaacttctgggctcaagcagtcatctcactgcagtctcccgagaagctgggattacaggcgtgtgccaccaagcctagctgattttttttttttttttccgagatggagatttgctcttgttgcccactctggagtgcagtggcgcaatcttggctcaccgcagcctctgcctcctgggttcaagcaattctcctgcctcagtctcccgagtagctgagattacaggtgcctgccaccatgcccagctaattctgtatttttagtagagatggggtttcactatgttggccaggctgatcttgaactcttgacctcgtgatctgcccgcctcggcctcccaaagtgttggaaggccgaggcgggcagatcacgcctgtgctgggaggctgaggcgggtagccactgctcccagccctgaaatctttcctcttttctaagatagacatttaatgcacacacacattttgatatgctatgttttaattttcattcagcttaaaatatctaatttttcttttgatttattctttaacttactgattatttagaagtgtgatattatattttgggaataaaaatccagagatcttactgttactgatttttgatttaattccattgtggtaagagaacataccttatatgatttgaatccttttaaattgattgagacttgttttatggatcagaataaggtgtcttgataaaggttccacgggcacttgaaaagaatgtgtattctactgttgttaggtagagcattctattaatgttgattggcttgttgattgataatgttcaagtcttctgtattcttaccgatttcctattctatcagttatagacagagggtgttaaaatctcaattctgttttgcttgttgattgataatgtttaagtcttctgtattcttaccgattttctgttctatcaattatagagagaggtgttaaaatctcaattctgtttgtttttggtttgaaatttacttataaggtacataagcatttatgattgtcgtcatcttgatgaattggtctctgtcattttgaaatgacagaacttactttgtctcataatatagctactcgtgcttttcatttgattagtgtttggcatatatttttatattttaaaaaaacttatcacctgtgtctttatgtttaaagtggttttttttcccaggcatcatgtgtttgggatcttgcttttatccagtttgatagtgtttgccttttaattggagtttgtagactatttatgtttaatgtgattactgatttttttttgagatggagtctcgccctgtcgcccaggctgcagtgcagtggcacgatctcagctcactccaacctccgtttcccgggttcaagtcattctcttgcctcagcctcccaagtagctgggactgcaggcacctgacaccacacccggctaatttttgtatttttagtagagatggggtttcaccatattggccaggctggtctcaaactgctgactttgtgatccgcccacctcagcctcccaaagtgctgggattacaggtgtgagccactgcggctggatgtttactgatttttatagagtttaaacaaccatcttttctatttgtctgatgtggtgtttttttcgtttttgtttttttaagatggactgtcactctgtcgtctaggctggagtgcagtggtgcaatctcaactcactgtaacctttgcctcctgggttcaagcagttttcctgtctcagcctcccaagtagctgggattacaggtgcgtgccaccacacctggctatttttttttttttttttttggtttgagacagagtctcgcactgtcacctgggctggagtgcagtggcgcgatctcggctcactgcaatctccgcctcctgggttcaagcgatactcctgcctcagcctcccaagtagctggtattacaggcgcccatcaccacacccagctaatgttttgtatttttagtagagacagggtttcactatattggccaggctggtctcaaattcctgaccttgtgatctgcccgccttggcctcccaaagtgctgggattacaggcgtgagccaccgtgcctggcctaatttttgtatttttagtagagatgggcttttgccatgttggccaagcaggtctcgaattcctgacctcaagtgatccctgcccttggcctcccaaagtgctggcattacaggagtgagctacgccatgcctggcctggattgaggattttttagtggttcatttttaagtcctttcttggctcattagtactttgttattttagtggctgctttagtgtttattgagttcagcttgtgaaactcagtctttaatattataccacttcacctatattacaagaaccttatagcagtacacttcattttcccttcagactttgtgctatgtttgtcatacacttcacttttacatatgttgtaaactccacaatacattattatttttcatttaagtagtcaatttttttaaaacaatttttttttttttgagacggagtctcactcggttgcccaggctacagtgcagtggtgcaatcttggcttactgcagcctctgcctcctgggttcaagtgattcttatgcctcagcctcctgagtagctgggattacaggtgcgccccatcatgcctggctgatttttgtattattagtagagatggggttttgccacgttggcccagcaggtctcgaactcctgagctccagtgatccgcctgtcttggcctcccaaagtgctgggattacaggcatgagccaccatgcctggcctaaaaagattttaaaagtaagaaaaaatgtcttttactttatatgttttccatttctggtgttctttattgcctatgagcggttccagattctcatctgccagattttcttcagttttttctcgtcagttcagattttctttctgccagaggacttcctttaatgtgtttcttgtagtgtaggtctgctggtgatatctttaagctttggtgtgtttgaaaaagtacttcctcttgtttttagaaagatatattcctttgatacagaattctaggttgacaggtttttttcattgtgtactttaaagatgttgctccactgtctctagcttgcattatttctcctgtaaaatctgttgttattttaatctttgttcttcagcgagcaaatttatcttttttgccttttttggttaatttttaagattttctttttatcactgctttttcagcaatgtgtttattatatactttgttgtagtttgcgtcatatttcttgtgtttgaattctcttgagcttcatggatgaaatttacgtattcagctactatttcttgaaatatttttcttttgtacttccccaccgcatctggagtctgtaattacatgtatatttggctgcttgaagtagtcatacaactcactgatgcactgttatgttttttagtcatttgattctctttgttttgggtagtttctactgatcttcatttcactagtctttatctttcccatgttaaatctgttactcttatccagaattataccttttatccttaaaaattcagtttttttcttttttttgagacggagtctcattctgtcacccaggctgaagtgcagtggcatgatcttggctcgctgcaacctccgcttcccaggttcaagcgattatcctgcctcagcctcccaagtagctgtgattacaggcatgcatcaccatgtctggctagtttttgtatttttagtagagacagagcttcaccatgtttgccaggctggtctcaaacccctgacttcaggtgatccacctgcctcagcctcctagagtgctgggattacaggaatgagcgaccacacctggtttgtttcttaaaaaacatcttatatttctctgcttaacgtgctcaatgttgaacatgtgaaatataataacttttcataatctcttctgattctgtctctatatcatctttgggtctgtttttatgtattctatttttcttgtcattatgggtcagatttcccagttctttgcaatcctaataaattctgtttagatgaaagacattgtgaatttcactttgggttgtggatatttttgtattcatgttggtatttttgagatttgttctggagtgcagatgagttagctggaaactaattcttttgaggcttgctttttagctttgttaggtggggcgtatcctttctgtgtttatttttgtaagggtatacagatatacatgttttcttatttccctctttatttattcttatttaatctgtaacaatctttttccttatattcgtaacattcttagttagggagtaattacctcttccctaactgttgcattagcttcttaattggcactctggttcccagactttttctgtctctaatgcagtgtacagactactgtcagaataattctaaagcacaattctgatattgtcactgtattgcttttcagtgcctacagcagtaggattcacttaaaaaattattcccctaatagtaatataaaaaatttttttgagctcaaactctcattctctctcagtatacatatttgtttatacatgaggtcacatactgcttactaagttagcattttttatgtgttcattttgaaataactctgaacagtggtatccaatcttttggcttccctgggccacattagaagaagaattgtcttgggccacacataaaatacactaatgatagctgaatagctaaaaattaaacattgcaaaaaaaaaaaacaaacaaaaaaaactcactgtggctttttttttttttccctgtatttttctttttcccgagatgaagtcatgctctgttgctcaggctggagtgcagtagtgtgatctcggctcactgcaacctccgcctaccaggttcaagcagttctcctgcctcagcctcccgagtagctgggattaaaggggtaagcccccatgcctggcctttttttttttttttttgtggggtgagcgaccatgcctggctttttttttttttttttttttttttttttttggtagagatggggtttcatcatgttggccagtctggtctcgaactcttgaccttgtaattcacctgccttggcctcctaaggtgttgggattacaggtgtgagccaccactcctggccttttttttttttttttttgagatggagtctcactttgtcacccaggctggagtgcagtggcatgatctcggctcgctgcagccactgcctcccgggttcaagcagttctcctgcctcaccctcccgagtagctgggattacaggtgtgtgccaccactcccagctagttttttgtatttttagtagaggcaggtttcaccatattggccaggctggtgaactcctgacctcaagtgatgcacccacctgggcctcccaaatgctgctggaattgcaggcgtgagccaccatgccaagccaattgtgttttaagaaaagtttatgaattagtattgggcagcatcgaaagtttacaaagtttgcgttgggccgcattgaaagctgtcctgggctgtgtgcgacctgctggccgcaggttggacaaacttgctctgggacataagtttaaaagttataggccaagtgccttggctcacgcctgtaatgtctttgcatttcatcagtttttccactgttatctttctgttacagtacacggtcagaataccacattgcatttagttgtcatgtttccttagatgtgaaacaaatttaccaattgtagtagggtatttacgtatagatcggttcgtttgtagccttatagtatctagttaaaacactgttataaagttattgttatgtatccttttgggtgtggtttctttccttagaaaaatacatttaaaattcattcatgttgttaaatgaatcaataggttgtttctcttttaaaaattgagatgaaattcacataacaaaattaaccattttatttttttaattttatatatattttctgagatggagtctcactctgtagcccaggctggagtgcagtgacgcgatctcggctcactgcaacatctgcctcctgggttcaagcgattctcagccttaaccattttaaagtgcacagttaagtggcatttagtacattcacagtgttgggtaaccatctttatctggttccaaaacatttttttttctttgaaagaaaaccccgtatttattaagcatttttctctctgtccttttcccttcactcgcttctggcaaacaccagtctgctctgtttctgtggatttacctgttctggatattttatacaaatggaatcatagcgtatgtagccttttgtggctggttttgttttttttgtttgtttttttttttgttttttttttttgagacggagtcttgctctgtcgcccaggctggagtgcagtggcgggatctcggctcactgcaagctccacctgccgggttcacgccattctcctgcctcagcctcccaagtagctgggactacaggcgcccgccactacgcccggctcattttttgtatttttagtagagacggggtttcaccgttttagctgggatggtctcgatctcctgacctcgtgatccgcccgcctcggcctcccaaagtgctgggattacaggcgtgagccaccgcgcccggcctggttttgttttagtaagatacttttgctggattaagaataaggttgggccaggggtggtggctcatgcctataatcccagcactttgggaggccgagttggcccagcctggccaacacagtgaaaccccatctttactaaaaatacaaaaattagtcaggcatggtggcgggtaccttgtaatcccagctacttggaaggctgaggcaggaggattgcttgaacccgggaagcggagtttgcagttagccaagatcatgccactgcactctagcctgggcgacaagagcaagactcgtttcaaagaaaaaaaaaagaatacgtagttgacaggtttttttttctttcaatactttaaagatgatataccactgtcttgtcactcaccttgtttctaacaagaaatctgctatctttgttctgtattttgcatgctttttttttccttgctgcttttattattttctctttattactggttttgagcattagattatgatatgccagtatggtttttcttgtgtttattgtgcttgtggttcattgatgttcttggatatgtcggtttatagctttcttcaggtttcggattttttttttttttggccatttttttcaaattattttccatttaatttctcttttctttttagtcaggtactctttatccaaacattaggctgcttgaagttgccccatagcttactgatagtttttgttttaacctgtgttttatttgaaagattctatttctgtgcctttgaatttactttcttttgcagtgtgtaatctgaagttagtcacatttagcatttttaaaaatctcacatattttactctttttttttttttttttttttttttttttttaaagactgagtctcactctgttgcctgggctggggtgcagtggcacaatttcagctcactacaacctccgcctcctggtttcaagcgatcctcccacctcagcctcccgagtagctgggactacaggcacccgccactacgcctggctcatttttgtatttgtagtagagacggggtttcgccatgttggccaggctggtcttgaactcctgacctcaagtgatctgcttgcctcagcctcccaaattgatgggattacaggtgtgagccaccatgcccggccatattttacctttttttatcgttagaattttgatttggtttaaaaaaaaatctttcctgtctctacttaagtttttgaatatatgaaatgcagatataactcttataatgtccttgtgtactcattctaacatctgtgtcatttcagggttggttgcaattgactattctctttagtatacttttttttccttgcctcttgcctggtgatctttgattggatttcagacatagagagttttacctcgttgggtgctggggatatttgtatttctacatatgttctttaactttgttattggatgcagttaagtcacttgaaaaccgttgattcctttaggtcttgtttgtaagatttgttagctgggaacggtgtagtagttggtttatggctaattcttcctcacttctgagacaagattcttcccaaatcttgagggttgtcttgagatttccagtctaatagctacttgagtgggtaagggcagagtactgttcataattcttttgggtgttgttttcctctccttgctgcccatggtcttgggtagtttcatcacactatgggccactcagtactcagtgagtacctctctagatctcctcagccctctactgtgtggtattgtcccatgaattctagctgcctaagtcctgcactctgagctgagctcgctgtcttcaattttgagttctgcagcctccatagggcttctgcttctgcatggtgcccaggaaactctcttcaggcactaagtttggccatcataggactcatatctttgtttctcttcctttggggattactgtctctcattgcctgctgcgcagcatcttgaaagctatagtttcatgttttgttagttattttagtggtttaaggtgagagggtaaatctggtccctgttgtgcttgaaaagtttttttcaacttttcttttagaaataattttaggtttactaaaagctgcagaaataatacagagttctgaggtgtctttcacccacttcccccatgataacattttacataaccatagtatagttattaaaactaggaaattgacattggtataatagtgttaactaaacctcatgccttatttcatattttcacatgaactattttgagctggcatggttaatatacagttctatgaagttttatcacgtgtatagatttcgtgtaattatcactagtcaggttatagaagtattccatcattttaatgaaatgcctttgtactactcctgtgtagtcatcatgtcctccttccagcctccaccaccaatcaaccaaccaactttaatcctggcagctaccagttgtctgaattttatcactttcgctataattttatctttctcagaatgtcataatacagtagtccccgttatctgtggtgatatgttctaagacccccagtggatgcctgaaaccagctatagtactgaaccatatatgtgtgtgtgtgtgtgtgtgtgttttttccccccccccctttttttttttgagacggagtctcactctcgtcacccagactagggtgcagtggtgtgatcttggctcactgcaatctgcacctcacaggttcaagcgattcttctgcctcagcctcctgggtaactgggattacaggttcgtgttaccacgcaggctaattttttgtatttttagttgaggtggggtttcaccatgttggccaggctggtctcgaactcctgacctcaagtgatccacccaccttagcctcccaaagtgctgggattacaggcgtgagccactgcacctggcctactatacatatacgcctatgatgaaatttaatttataaattaggcacagtaagagattaacaataataaaaaattataacaatatactataataaaagttatgtgaatgttgtttctctctcaaaatactgtaatattttcaggctgcagttgaccatgcgtagctgaaagcaagggtaagtggtgactactgtaaatagaatcatataatatgttacctttgagattggcttttcttttttaactcggcaaaatgcctttgaaatcgatccaagtcctatgtattaacactgtttctttttattggtgagtagtattctattcttgggcacactacagtttacccattcttccattgagagcatttctcccccctaaattacaaacagagatggagtcttgctttgtggttggtctccaactcctaggctcaatctatcctcctgcctcagcctcccaaagtgctgggattagaggcatgtgccactgtgcctggccccactgaagaacatttgagttgttcccagtttggggctattacaaataaagctgctgtgaacatttgcatgcagattttagtgtgaaaatatttttatttctctaggatgaatacctacctatgagtagaattgctgggtcgtatgatacatgtatatttaactctgtaagaaacgactacactgttttccagagtggtggtagtttttcattcccactaacaatgtataagaaatccaattgttctgcttttttattagcactttagtattgtcagtatttttccttctgttcattgtaatagatgcatagtagtatctcatgccttaaatttgcatttccgtagtggctaatgatgttgaatatcttttcatctccttaggttccatttgaatattctctttggtgtagtttatgttcaagacttttctattttcaaattggattttttcttactgttgagtgttctagacacaagttatttgttggatacgtgatttgcaaatattttctcctaatcttttaatttgcctaagagtgtgcttcatagagcaaaaggtttgaattcttatgaagtctaatttatctatttttaaattttatagttttttttggtgtcatatctaagcactctttggctaacaaaattttctctttttttctaaaagttgtatgctttacatttaagtctgtgattgcatttgaattaatttttaaattaagcataaggttacatcaatgttcattttcctttttgggggaccaattattccaaaaccatttgcttaaaatgattattctttatttattgaattgctttctcacctctagcaaaagtcagttggccatattttgtgaaaagttctattcctacgcacactgttctggctcattgacctacgcatctgttcctctgtcaataccgtactgtcttgattactgtaatgtagctgtatagtaagtcctaaaatcaggtagtgttattcctccaccttcgtttttctttttcagagttgtttcagctattctggtttctttgtctttacatggaaattttatttatttattatttattttcttgagacagcctcagtgttttgcccgggctggggtgtggtggtatgatcatagttcactgctgcctggaattcctgggctcaagggatcctcctgcctcagccttccgggtagctgggactacagatgtacaccaccactcccagctaatttttactttttttgtagtgctggggtgtcaccctgttgcccatgttggtctcaaacacctgggctcaagtgatcttcctgcctcagcctcccaaagtgctgggattaaaggcatgagccaccacagtcagctgtgtatgaattttagaatcatattatctacaataaagttttggtggagtttcaatagtaaatgcattaaacccattggttagtttggggagaagtgacatcttggccatgttgtcttccagttcatggatatagtatgtttttttacatttatttaggttgtcttttttttttaaaggtacataataattgtacatatttatggggtgcatgtgatattttgatacaggtatgcagtgtataatgatcaaagcaaggtatttaggctatccatcacctcaaatatttatcatttctttatgttgggaatttttcaactcttcccttctaggtattttgaaatataaacaaattatagttaactacagtcaccatactgtgctgttgaaccctggaactaatttcttctatctaactgtatgtttgtacccattgaccaacccctctttatctccctgcccccttcccagctctggtaacgatcattttactctctgcctccacgagatcaactcttttagctcccacataggagtgacaacatgtgatatttatctttctgtgcctcttcctttacttaacaatgtatttaggtcatctttggtatttttatcagcatttcataggttttagcatgcatattttgtacagttttgttagatatatacctagttttttttggtaaactattataaatgaaattgtgcttttaatttttgtttctaattgctgattgctaatatatagacattattgatgttagtgtgttgatctgtattctgtgacctttataaactcacttattagttctacaagtttttctcctagaatctttgggattttctctgttagaccatcatatcatctgttaatagggccggtttaatatattcctttctgatatgtgtaccttttatttccttttcttgcttgattgactagctgggacttgtttgctgtgtcgaatatgagtgcttagtgtggacattcttgccttattcccgctttcagatagaaagcctttagtctttcaccactagtatgatgttagttatagacattttatagatggtctttatcaagttgaggacgttttcttctattcctagtttactgagagtttttatcatgaatgtatttgttgaattttgtcaaagtttctgcattgatataaataattatgctttcttttcacatcttattgttttagtttgcatttccttgatgatgaattccttttcatatgcttactgaccattttatcatcttcctgcgtgaattttctattagttttgcccatttaaaaaaagtttttattttgtagcaattttaagctttcataaagttctaagtacagtacaaagaactttattttttcctgacccattttagagccctgttgttccttactatttttatttattttttgagacagggtctgtcactctgttgtacagactggagtgcagtggtactatcatagctcactccagggcataaacgatcctcctgcctcagcctcctgagtagctgggacaagtgtgtgccaccatgcctggctaatttttttaattttaattttttgaacttctgggctcaagcgatcctcttgcctcagcctcccaaagtgttgggattataggcatgcaccaccgcacctggccctacccttaatactttagtattaatgttttagtatatttgccttaaagttaatgacattctccttgctacctgtccacaatacattcataaaattcagaaaattacactgagtcattattaccatctaatcttcagatttcattaaagtttagctaattgtccatgtaatgtcctttttgtccaaagtatctaggtcagaattatgtgttgcatggagttgtcatatgtctttggtctccttcattctagaacagttctttaatctttctttgattttcgtgaccttgactcctttgaagactacagaccagttattttgtggaatcttttttagtttgaattttctcataattggattcaggttttgcatctttgtcaggtatagcagagaagtgatgctaggttcttagtgtgtcctgtcaggtagctctttatttcagttttttcctattattgattatctctttgatcacttggttaaggtagcatctgccatccttcatcactataaagctcctttttacccccacccctttttttttgagatggggttttgctcctcttgcccaggcttggagtgcaatgtctcaaaaaaaaattaatagtaatatatacagtcatagttagaagccaagatctagtttctaaatgtttgctgctgttggagtgttggtgatcccagttcctttcagtgggaaggggctaaggaatatatgggtatatttacatacatacacatatgttcactcaatctatatttatatctgtctttatctaaatatgttgaaaactatgagcttaccccaataatacaagttctaatccagtcattctagttttttccctttccatatgtataagtcctttttccaacaataataaatctgggctgggcgcagtggcttacacctgtaatcccagcactttgggaggctgaggcgggtggattgcttgaacacaggcgttctagatcagcctgggcaacatgtcaaaaccccatctatatggggaaaaaaaaaaaagttagccaggtgtggtggcacatgcctgtagtcccagctactcaggaggctgaggtgggaggatcacttgagcccaggaggtcaaggctacagcgagccgagattgcaccactgcactccagccagagctactgagtgagaccctgtctcaaatctattccctaatatatttacctaattatttaatcacccactcttcactgttgcagccctttcttcatgcagatgtcctctttactttgcttggactccaacaccctgtgttgggttggctccactctcatcccatggatgagttcactcaagctctgaccagtcacatcagggtgttctcccatatacatgcccttctcaacccgcgtgggcttcaatactctgtcctttgtcattccctgtttgggcatttcactcatcttgatctccaactctcacgtcataccacactcagatacacacagataccttctgtgctccactcaggctctgactctctactcttgtctacctagcctcaggcctccacttttgtatggatgcctaccttgctgtgtaccatgtaatggaagggaagactagtttgggggaagagaagggcagctcttcccatttaaaaagattggtttgtctttttgttttaggtttatagaattgaaatatataggtgggcttggtggctcacgcatgtaatcccagcactttgggaggctgaggcaggtggatcactttggtttaggagtttgagattagcctggtcaacatggtgaaaccccatctctactaaaaatacagaaaaattagctgggtgtggtggagggtacctgtaattccagctactcagaaggctgaggcacaagaattgcttgaacctgggaggtggaggttgcagtgagctgagatcgtgccactgctctccaacctgggcaacagagctagactccgtctcggggggaaaaaaaagaattgaaatatatgtatacacacacatatacacactctggatacatactgtatcccgagtatgtgttttgcaaatattttctcccagtctgtggcctgccttttatttcttttcttttttttgagacagggtcttcctctgtcacccacgctagagtgcggtagcacagtcacaactcaccgcagcctcaacttcctgggctcaaagtgatcctcccacctcagtctcttgagtagctgggactacagacacgtgccaccactcctggcccattatgtctgttttttgtagagatgacgtctcactatgttgcctagggtggtctcaaactcctaggctcaagtgatcatcccacctcagcctcccaaagtgctggtgagccaccatgcctggcctggcctggcctgcctttgcatttttattaaagtgtcttttgattagaagtttttttgttttgaggaagtctgttttatccacattaaaacaatatgtttttaggaacttttgcctatctattaatagtgcacaaaaatattttttggctttatatttttggctcttaggtgtgcgatttatgtcaaattaatttttatttttgagagggagtctagctttgtcacccaggctggagtgcagtggcacaatcttggctcactgcaatctccacctcccaggttcaagcaattctcctacctcagcctcctgagtagctgggattataagcacttgccaccatgcctatttttctatttttagtagagatggggttttaccatgtttgccagcctggtcttgaactcctgacctcaggtgacctgcccgcttcagcctcccaaagttgctgggattacaggcttgagtcaccatgcctggcctcaaattaatttctatgtacggttcgaggtagtcattcaggtttgcgtttttacgtgtttatcttgtttcagctttatttgttgaaatgatgttcccctctttattgaatagctttggtgcctttgtcaaaaatcagttgagtccatacataaggatatgtttttgtactctgttctgttccattaatctatctatttttataccaatattttactctcctgattttagtaagtcatgagattggatagtgttagtagtgtgaatcctctgtgttcttccttcttaaaattgcttggactgcttttggttctttgcatttatttttctttcttttttagagacaaggtcttgctctgtcggcaggctgtagtgcagtgacgcagtcctagcttactgcatcctaaaacttccgggctcaagccatcctcctgcctcaagctcccaaggcgctgggattatgtgtgtgagccaccatgcccagccttctttgcattttcatataaattttagaatcaacttgtcaatttttatcaattaaaaaaattgggattttgattaggattatgttgactttgtagggagaattaacttctcaacagcattttttttcaatccatgaacatggtataatctccagttattatcatctttaatttttcttagtgttttatagtttccaatgaggtcttgcatgccttaacatttttttctcaagtatttttatttttttaattttttaaattaatttatttttttgagatggcgttttgctcttgttgcccaggctggagtgcagtggcggaatcttggctcactgcaacctttgcctcccagtttcaagcgattcacctgcctcagcctccctagtagctgggattacaggcgggcaccaccatacctggctaattttttgtatttttagtagagacagggtttcaccatgttggccaggctgttctcaaactcttgacctcgtgatctacctgccttggccttccaaagtgctgggattataggcgtgagccaccatgcccagcctcagctatttttattttcgatgctattatacatggaatttgttttaaaaatttgtttcccagttttttgccctagcaggtatatagctgatttttcaataacttgtaattttgacataatttcagacacgattgtatttgctttataattctagctacatgttatttttttcatgtactaaagtgcagacataatgccccctaacctctaaatagttattaacaacaagtacattctctttcataaccacattgcaattatcaatgtcagaaaattaatgttgatatggtactgcttgctgtctaatgtgcatactttgagctgggcttggtggtatacacctatagtcttagctactcaggaggctgaggtgggaggatcgcttgagcctaggagttgaaggctgcagtatgccatgatcaaccctgtgaatagccactgtactccagcctgggcaacaatagtgagatccctatctttaaaaaaaaaactgcatattttactgaaattttacctattcttttctaatgccaattataaagcaaaattctggttgaggatctcatccttgatcacatggtacatttgtttgtcaaatctcattttctttaatctgaaaaagttctcacaaacattgtcttttatgacttaattttttttaaagtacagaccatttattttgtattaatagtaagttctccaatatggatttgtcttgatgcttttcattattaaagtaatgtttttgacaggaatacctcagcatgtcctcctcagtacattttatcaggagacacgatacctgtttgtctgatttctgataacgataacttcaaacacttggttaaggtggtgtctgccttatttctctcctataaatagtaccttgtagagagatacagtagtcccctttatctgctggggatgtttcaagaccagtgggtgcctgaaattacagatagtcccaagccctatatatactgtgttttttcctatgcatatgtacttttgataaattttattttattattcctttatttagtttttagaaatacggtcttacaccgttgcccagcctggtcctgaatgaacttctggcctcaagtgatcctcctgcactggtctcccaaagtgttgggactacaggtgtgagccactgtgcccagccccccaagtttaatttctaaattaggcacagtaaaagaataacaacaataactaagaataaaatataacaattgcaacaatgtactataatcaaagttatgtggatgtgatccttctttctctctcaaaatactgtaattttttggactgctgttgaccacaggttatttaaactgtggaaggtgaaacttcgggtagagggcacttactgtactttgagactatatgaatagtctcatgtactttcattcactggttttagcatccactgatgaaggattcctacctaaaacagttagtacgctgaggctgggtgcagtagctcacacctgtaatcccaacactttgggagaccgaggtgggtggatcatttgatgtcaggagtttgagaccagccttgccaacatggtgaaaccctgtctctgctaaaaatacaaaaaaattagctggacatgatggcgcatgcctgtaatctcagctactgggggagggtgaggcaggagaatcgcttgaaccctggagatggaggttgcagtgagctgagatcgtgccactgcactccagcctgggcaacagaacaagactctgtctcaaaaaaaaaaaaaaataaaaaaaataaaaaaaaattagtactctgagagttgttgtcaagtggtgattttttttttttttaagttccaccatttatctgacatctattagttgtggtttttcagtaagggggagagctttaatttattcccccatttgtttattcgttgtgaatttatggattcttttttttttttttttttttttttttgagatggagtctcatgcgctctgtcacccaggctggaatgtagtggcacaatctcggctcactgcaacctctgtctcctgggttcaagtgattcatcttccttagcttcacgagtagctggggttacaggtgcctgccaccatgcccggctaatttttgtctttttagtagagacggtttcaccatgttggccaggcttgtctctccaactcctggcctcaagcgatccacccgcctcagcctcccaaagtgctgggattacaggcataagccactgtgcccggccatggattcctttttttttttttttttttttaaaatatgaagactcgctctgttgcccaggctggagtgcagtagtgcgatcttggctcactgcagcctctgccgcctgggttcaagtgattctcctgcctcagcctcacaagtagctgggattacaggtttgtgccaccacacccagcttttatatttttagtagagatggggtttcaccatgttggccaggctggtctcgaactcctgacctcaagttatccacccgctttggcctcccaaagtgctgagatcataggcatgagccattatgcccagccctacccatggattcttattttattattgagttataatcttactatcatttttaatgtacaaattgtcgctgatttggccagtggaattgcatgtactccagcttttgtgtcctttttatgtgttttcctcattcctgaacacttctttacttacctgctttctgacccagcaagatgttctgggcttagcttatattttcccagccccacttctagaatcatccattttcctggggagctctggtttcttttagcttagaatagtatgcatgtatacatctgtacctgtttctctctttgtctgtctataggtaaatatagtattcatactaataccttgaaattagtctcttactgggggtttcattctaactttacctttctatatgtgcatcttgctactccaacattgaacaacctggcttctattatgtactttgtatctacctacttgctcagttttagtataaacacttagtagttttataattgttaacccattccactgtggaagaacaaatctaactagaactcagtatttgtttatagttcatttaggtttttagcctaaggatatatagtcaaaatacttgaagaattacttgggttagatctgtccttgtgccccttcagtgtggttatgttattcactttaagtatatgtcagtaaaaattttaaatgtatcacaaccacttcctctttttagtgctgtgggaaaacaagcactgttgcattacccttaagaaaagaaataaatttttttttttttttttttggaaacaggtctcactctgtctcccaggctggagggcaatggtgggatcgtagctcacgtcagcctcccaagtagctgggactacaggcatatgcatcctggctggctaatttttttttttttttgcagacatgggggtctcactatgttgcctaggcttatcttgaactcctgggctcaagtgatcctcccgccttgccattccaaagtgttaggattataggcgtgagccactgtccccaggtcaagaaaacaaatggatacttttttttgttgggggatttgatactattaacaaaattatatttgcatctaccttttgaccgattgtttccatttgattattcaaggcagtagtatttgtagttgcagaatattaaaagccatctaaatgctggtggtacatgagggagtggttatactttgatacatcaacatcatggagtatcatgcagctgagaagaaaatgaggaagttttcatgaaacgatagagtaatttccagaatatattgttaagtggaaaattgaagagcaaaatactctctgaggcacgcagattttgttgttgttgttgtttaaggatgaaggataaataaaacagatgtgtatattatcatttgtacaaaaagaaacacaagaagaatacaccggaaacaatgaggttggttaggggactaacaggaatggaatggagagttggagggggatggaaatggaagggatggtggggagcagtgtcacttactctgagtataaccttttatatagttttgatttgtaatcatgttatatttcacataattcaatatgtagataaaataacaaagatgggaaataaaaaacaaaatgggttacaaacaaaagatgaaacccagtgctattaacagctgtacaattcttgatgtgttcaacgtatttcattcttctttctgaatgtttgttcctggagccatcttttttcctgctctccgcatggacagtttgtggtgtaaggtggccagccatcctggtttgcccacgattgaggggtttcccggggtgtaggactttcagtgctaaaactggaaactcccaggcaaactggggcctgttggctactcttttcacgtgcatgtggctgttttcctcggactttccttatatgtaccttgggaattctcttcactttctcctggtatgtcctgcctttcctagatctcacacaaatctcatttattgttactcctttagttgtgtgcgcattctctacacaatacatttatgtagagcagattgacgtagagttgcttctagagaacaggtgcctaggaggtaaattgaggccttacatgtctttattctgtgttccacactagattgttggttgggctcagaattccagaagatgttactcttactactacattcttcagagctgcttttgagaaacatgccattgtgatttctggatatcgtgtgttttttttgaccggaagattttaggatctgtttctctcctgtgttttgagatttcatgataatgctgtggaatgggtctttttcattcattatgctgagtgttttgccttattaaactcggaaactggagtcttctcatttggggaaaatttcttgtattatttctgtcttttggctttcttcctctggaccttctatttgttggatgtgggactctcttaatggagcttctttttcttttttttttttaatcagttctctaggagataatctgttgtttttggcctctcatttttaatttctagcagattgttcatgttctttaatgttgctttatttttttaaaaaaatattctggctgagctgtagtacgtgtctgtggtcccgactactggggaggccaaggtgggagaattgcttacgaccaggagtttgagtccagcctgggcaacatagcaacaccccatatcttattttaaaaaaagcactctatgtttgttttgggcctctttgagaacatttactatgaaattttatttatctttgtttcctttcagttcttcttttgtttattgtgattatctttcatataacaatgtgcttaaatagctggtggttcttgataggtcactcaacagtgagcaaactgatggatcctgtgtttgtgagcagtgtttattggctgtgatagagggtggggacctagatgcttttaggggatcctcctgttatccatttctgaaagtgttttctcctaggctggtcactttttccaggaggagaaatcctttcatctcttgccatctacatgacagtaggctgtggttggggtcatagtactactactatttggggagctttgggagccaaggtggggagggaagctagtggtgtcatgattttctggtgttttttgtttgtttgtttgtttgtttgtttgttttgttttgtttgagatggagtttatctcttgccgcccaggctggagtgcagtggtgccatctcaactcactgcaacctctacctcctgggttcaagcaattctccagcctcagcctccctagtagctgggattacaggtgcccgccatcacccctggctaatttttgtatttttagtatagatggggtttcgccatgttggccaggctggtctcgaactcctgacctcaggtgatcttcctgcctcagcctcccaaagtgctgggattacaggtgtgagccaccatgcccagcctgcgtcatgattttctattgttggtcttatttagagtgtggcatctcactccatgccccatcccttgagctgtgcctctagtcttctgttccagaacttccgtggttcagtttaatcagaatataaatctgttttcctctggagtgggagaagggtgtattgccttactgtttagggacaggaaggagacctgagggggtctgactgttttattcagagtttgaaacagttctcctgttctcagcccctgcctctcaactcttgtctgcagtggttcctggtgcctcccacttccctgcgtgctccgggcttttgaagcactggcttgctttttgtggcttttccctctgcagccataaacttcaactttccttctttgctgagtcagttacttcttaccttcctgctcaacctggtctttcagatttctgttgacatccctcatctactgcctttttccttccccttactctttgtctttatgcatgtacacttttactgttcccttatagtcattctagtgaaccctcaggaagatgcaaagaagtatatgttcattttgccatgtttatccacaacccccaaataccattaaacaaaagaaaagaaaaaatatttaaaaaagaaaacaaaaacaaaaacaaaacaaacccttaataaatggagagcagctatgccatgttgttgattaagaagattctatatcgtaaagatgtcagttcttcccaatttgatttgtagattcaatgcagtacactacaaattttgaaaattgagatataatagttatatgtattttgggggtacaggtgatattttgatacctgtatgcaatacatagacatttttctttgtgttgggaacattaaaattcttcttttctagttattttgaaatatatagtaaattattgtttactataattttcctattctactattgaatattagaacttactccttctatttaactgtaattttataccccttaaccaacttctattttgccatgtttaaatatggaagctcaagcgtttgtacagagaaagtggaaaatgcccttggcttttatgccaaaccccaatccctctgtccccacctgccaccctggcctgttgcccctgttcttcccagtagctacaaccactatcattaatttaacgtgcatcctcctattcatatggaggtatgtggtatgtttgtttatataagtgtattttattttctttaatgtttaatagtgtaccatatcaatatagctacattttatttatccagtcccctgctatgaatatgtgcgtttttcactgttttctaatccctgttataaacactgcagcaacacttatccttaatctccatgtacaaacgtgtgagaatttctctaagggactattcccttaccttttcatattgtatgcttgggtaaaatggaagtgacttggaggctctttctgtgggggttagtgaaaagatttcattacattttctttgcattttgtaattatgatgagaaaaatataaaacttataaatcttttttaaaagttttgagaaacatgctttgttacgatcatgacatcaagttttatgcttaaaaagtctgtaattccttgtgtttaatgatgaactcttcaaattcctgatacagatctatagtcccttattaacaattctgaaatccaaaatattatgagaactgaatttttttccccttgactgatttagtagtaaaacctgacctgtgtaaactcattttgtgtcaaaactctgatgtagattgacaggtctaggttagcttatttgtttcacttggtctttgtctacattttatttttttaaaaattaatgtgtttgattatgggttgctggtggtgctgatacacaatatatgcatatattaacattctaaaattcaagaaattctaaataaaaacacatctagacccaaagatttcaggtaagggattgtggacctgtggtcaccattagctagaaagtttcagctgtgagtggcaacttacaagaatttctttctggttgatagaaactcctttcttattattagtaagaactcagacaatttctttacgttatattccaagagtgtgttcattttttaaataacagctcttccttttctttcgttgacatctataatattgaaattgcttttgataatgcaaatggatttcacattcaagagaacctttttatgttaagtattttgtttaaatggagaagccttttctcaagcatgtatggagattgctttccttgttttaattcttctttaggattttcatgagaaaattaaaacatcattaatggaccattttagccacagttttccaaagttgcattttgactttggatctttaaactttctgtatactttaataggtatgtgtaggtttaaaaaaaattttttttttttgatcagaatcttttgttttaggccaggtgtggtggctcacacctgtagtcctagcacttgaggctgaggagggtggattgcttgcgctcaggagttcaagagcagcctgggcaatatggcaagaaccccatctctacaaaaaataaaaaagttggccgggcgcggtgactcatgtcagtaatcccagcactttgggaggctgaggcaggcgaatcacgaggtcaggagttcgagactagcctggccaacatggggaaaccccgtctctactaaaaatacaaaaaattagctgggcatagtggcaggcgcctgtaaccccagctacttgggaggctgaggcaggagaattgcttgaacccgggaggcagagattgcagtgagctgagatggagccactgtactccagcccagatgacagagcaagactctgtatcaaaaaaataataataataaataaatacaataaataaataaataaattagcctggagtggtggtgcatgcctctagttccagctacttgagaggctgaggtgggaagatcacttaagcctgggaggtcaaggctgcaaatgagctgtgatagcaccgtggcactttagcctgggcccgcacagtgagaccctgtctcaaaaaacaaaaacaaaaaatacgttttagaactatcagttaaattttgtaagccattgtttacctactttaattgggatttaattcatagaccatacagttcaccaatttaaagtatacaattcagtggcttctagtatattcatgaagttatgcaaccatcaccatggtctgattgcataatatttccatcaccccaaaaggaaaccccagtaggtcattcctattctcacctcctcctagtccctagcatcaccagtctactcatttaattactaaaactttctaaaaagcaactcctctcatcttgttcttcaagagtatcttggctctttgtgaccctgtgcttttccatgtaaaattctgtaaaagatcgtgttgagagctttattggaactgcattgaatcgacaaatcaaaatgggaagaattgacatctttttttttttttttttttttttttttttttttttttttttgagacggagtcttgctctgtcacccaggctggaatgcagtggcacaatcttggcctactgtaatctccgcctcccagcttcaagcgattctcctgccttagccttgcgagtagctaggattacaggtgcacgccaccatgtctggctaattattgtatttttggtagagatggggtttcatcatgttggtcaggctggtcttgaactcctgacgtcgtgatctgcccgccttagcctctcaaagtgctgggattacaggcttgagccaccatgcccagccaaattgacatctttatgatataaaatcttcttaatcaagaacatggtatagctctccatttatttagggtttgtttgtttttgtttttttgagacagggtcttgttctgtctctcaggctagagtgcagtggtgcgatcatagctcgctgcaacctgaaactcctgggctcaagcaatgctcccacctcagcctcccgagtagctgagactacaggtgcgcgtcaccatgtgcagctaatttttgaatttttttgtagagcgggggtctccttacgttgctcatgttggtcttgaactcttgggctcaagtgatcctccttcctcagcttcccaaagtgctgggattacaagtgtagccaacatgcctggccttaccaaggttttaagcctttcttgataaagttttatgttttcttcataaaatgatgatatttcttttgtggaatttatccctgggtaacttacgttcgtttttgttataaattatatttttgttataaattatatttttgttttcttttttcttcaaccctggcaaatggatatattttctttttttttttttttgagacagagtttcgctcttgttgcccaggctggagtgcagtggcaccatgtcagctcactgcaacctccgtctcccattcaggcaattctcctgcctcagcctcctgagtggccgggattacaggcgtgcgctaccacgccgggctaatttttgtatttttactagagtcagggtttcaccatgttggccaggttggtcttgaactcctgacctcagatgatccacccacctcggcctcccgaaatgctggcattacaggcatgagcccccacacccggctgatggataaattttctaattgatgatgttaattggtgatgttagtatcacttgatttttccttttttttttttttaatgtgatctcaaatgtcacaatgtggccaaaatcttttactaggtctgagtctcttggatctttaatgtaaataattatgctatctggaaattatgacatgcttttctaatcccttcttgtttctattatgcattgaaaggaattctagtatactgttgaatggttggtgttttcttagtttttcacagccttcaagtcagccttctcctaagagatagtacttattttttgctcaggaaagatataaggaaaggcataactgatattttgcttttttttttacttcagaatctaatcttgggcagtttaaactttatcaatttaaatgttagctctcctttgctcagatttgccacattcgtagtgtcttgtattttttaaaacatctgacctgtgggagaacattttattttggtttacttattacagatggtttattttttttcaacattagcttcttttctagttaccttgccaaactagtatacgttatgcattttagaaacacttatttgtattaatagatgaacgtgagtaaaaagtatacagcaagtcttctttgtactgttttactcttgcaaaagtagaatgaaaagcttttgcagctttcctgtaaaattgaatttctttccatataaaaatgttcaaaatgtatttgtaaaaggaatacgtactcatcatcagtattaaaaaggttcagaataaagaatccctacaactacagtttttaaaagacaactcaaaaaaaaaatgggtgaaagacttgaacagatacttaaagaggaagatatgaatatggccaataagcacattaagaagtgctcatgcagccataaaaaagaatgagttcatgccctttgcagggacgtggatgaagctggaaaccatcatcctcagcaaactaacacaggaacagaaaaccaaacaccccatgttctcactcataaatgggagtgaacagtgagaacccatggacacagggagggaaacatcacacaccggggcctgttggggggtggggggaaaggggagggagagcattaggaaaaatacctaatgcatgcggggcttaaaacctagatgatgggttaataggtgcagcaaaccaccatggcacatgtatgcttatgtaacaaacctgcacattctgcacatgtatcccagaacttaaagtaaaatttaaaaaaaaaaaaacttcaaaaaaaaaaaagtgctcaacatctttagacattaggcaaattaaaatgaaaatcattgaaatctagcactctgaattaaaattaaaaccacaatgaggtaccattatactcccactagaatggctaaaataaaactgccagcttcaaataatggtgaggatttggatcaactggaactctcctcaagtgctgttgggagtataattttttttttaataaagttagctttcatccatcttatgactcggcatttctactcctagatagttattcaggagaaatgaaaacgtctccaaaaatttacaagaatgttcataatagctttattcataatagctagaacctggaaataacccaaatgtccatcaagagagaatatacaaatggttgtatatgagaatattagtctgtaataacaaataatgaactactgatgcatgcaacaatgtagatgaatagcataaacaggctgagtgaaagaagccagatacaaaagaatatatatgtatgagtccatttacatgaagaccaagaacaggcaaaagtacgttatggagatagaagtcagaacaatgattgccttcgtggggtgagaggggtggtttcttttcttttttttttttttttttttgagacggagtctggctctgtcacccaggctggagtgcagtggcgtgatctcggctcactgcaagctccgcctcccgggttcatgccattctcctgcctcagcctcccgagtagctgggactacaggcgaccgccaccactcctggctaatttttttttttttttttgtatttttagtagagacggggtttcaccgtgttagccaggatggtctcgatctcctgacctcgtgatccgcctgccttggccttccaaagtgctgggattacaggtgtgagccaccgcgcccggccgagaggggtggtttcaaatgggggttgattaggaaggggcacaaggaaacttttgggggtgttggaaatgttctatatcttgatatgcatttgttagaactcattaaatggtacacctaagatctgtgcatatcactgtgtttaaattaaactttaatttaaaaaaataggggaaggataggaggaggtatacattgatccaagggcattctcctacgtaagcacaatacagttatcacactcagaaaatttaacattaatgcagcattaccatctagtatgcagttcacattcaaatatcccagtgtcttgaaatttgctgagagtagatcttaattgtcttcacactccccatctcacactctccctctcatggtaactgtgtggtgaaggattggttaatttttttttttttttttttttttaaagacagagtcttgcactgtctcccaggctggagtgcaatggcatgatcttggctcactgcaacctttgccttccaggttcaagtgattcttgtgcctcagcctcccgagtagctgggattacaagcgtgcaccaccatgcccggctaatttttgtatttttagtagagacggggtttcaccatgttggccaggctggtctcgaactcctgaccttgtgatccacccgccttggcctcccaaagtgctgggattgcaggcatgagccaccgtgcccggcctatagaattttttatatgtaggatttagtgaaagatcacccattattaatttttttaaaagcttcatgatgaaaattattcttgtaaaatgttaaaatcttgaatcctagggcatgttttctggcacctgttattttcagtaacccatttcgtttttgtcagacatatagggttaatgtatgaaaagtcaattatgtcaaacttatagagtttatatggaaagattaatgatcttttacaaatgcagaattggctggatgtggctaattgtagaattggcctgtaacctagcacttagggaggctgaggtgggaggatcgcttgagtccaggagtttgatttttttttttaattttttattttttgagacagtctcactctgtcgccctggctgaagtgcaatggcatgatctcagctcactgcaacctccacctcccaggttcaagcgattcttgtgcctcagcttcccaagtagctgggattacaggtgtgtgccaccatgcctagctaattttttgtgtgtgtgtgtatatttagtagggggggtttcatcatgttggcccaggctggtctcgaactcccagcttcaggtggtccccccatctcggcctcccaaagtgctggattacaggtgtgggccacaatacccagcattttttatttatttatttatttatgtatttgagatggagtttcaccctgttgcccaggctggagtgcaatggcatgatcttggctcactgcagcctgcatgtcccgggttcaagcgatcctcctgccacaacctcccgagtagctgggaatacaggcatgtacaccacacccaactaatttttgtatttaagtagagtcagggtttcattatgttggtcaggctggtctcgaactctggacctcaagtgatctgcctggcttggcctcccaaaatgctggaattacaggcttgagccactgcacctggccaagcccaggactttgagaccagcctgggcaacagaccaagaccctgtctgtacaataaaaattatgcagtattagaatagcaaatcttactcttaaaagttttgttttccttgtctttttactgaaaatgcatggctttagaaacttctgggtagtttgaattgcagacaaccaggccctattcctgtttgtttaactaatgagatttgtaaacagtacttggtttccccagactctaggacctagaggaaggaaattttgatttagctcttggtaaagcatttaacacctaatttttctttttcattgttattttcttgatcacagaaaacaatacatgttaatagtagaaaatacccacaattgaaaagaatataaagcacttactaaaactctaccacctaggctaggtacggtggctcacacctgtaatcccagtactttgggaggctgaggtgggtggatcacctgaggtcaggatttcaagaccatcctggccaacatggtgaaaccccatatctactaaaactacaaaaattagctgggcgtggtggcagccacctgtaatcccagctgctcgggaggctgaggcaggaaaatcgcttgaacccaggaggaggaggttgcagtgagccgagatcatgccgctgcactccatcctgggtgacagagcgagactcttgtctcaaaaaacaaacaaaaaaactgccacctagagatggtggtggccaacagcttagtaagaatttctcttgcatttttctatgcaaacacattcaaattttcattttttaaaaaagatgatagaatcatactgtatgaatttaattgcctaattaagcttgtgtatcatcgtttctcttgtcattaaatgctgtacagctttcttttaaatggctatctgtggtagtgttccttgaaggaaataccttaaaattttttgtttttaaacttttataattgtgggaatgtaatacagtgaatgcataggacacaaatgttcagcttaaggaattattataaagtgaacaccctgtaactgccacttagatcacgacatcaaatatggccagcagccaggcgcacctcccctaccccccactgccccttcccagtcacagccccattcttccagctgaaggtaacttctgtcttgactttatgaaagttattttcttgctttcctttagattacctacccgtctttgcattcctaatgctgtagtttagttgagcttattttgaacttttcacaaacggaatcatcaactatgcattattttgtatctggctttcattcactattttgtttttaatattcatctatgtcgttagtagctatagttcattcattttttgttgctgtataatcatccatttattgaatgtactacaatttgattctgcctttggcagccactttgattgtttataatccagatttcaaatgctgcatcatgaacatgtgggttgtgatttgtgtagatgtgcatgtacttctctaaggaatccaagcctaggagggacgttgctgggtcagaggatgtttgtatcttcaactgtaccagataaggccaaattgtattctcaaatgcttggatctgttttcagtgtacttgttctactcctaattaacactacttgatattgtcaaactttaattgtagccattctgatggatgtggtagtatctcattgcggttttaatttgcattattttgcattttccttattgttagtgagattaaatacccttttatatgttttggctacttcagtatcctcttgtgcagtgcctaattcacatcttttatttttcttctgagttgccttttgcccattgatttatatttgttccccctctctccccgcccccaagaaggagtctggctctgtcacccaggctggagtacagtggcacaatcttggctcactaacctctgcctccttcgttcaagtgattctcctgcctcagcctcccaagtagctgggactgcaggtgtgcgccaccacgcccagctaatttttgtatttttagtagagacagggtttcaccatgttgaccaggcttgtcttgaacccctgacctcaagtgatccatccgccttggcctcccaaagtactgggattacaggtgcaagccaccatgcccggcctgatttataaatgtagtctaaatacaagttctttattggttatgtaagttgcagatatctttttcagctctgtaggtaataatgttttttgatgaataggaggtcttaattttaatgtagtttaattgatttgttttctcctttgtaagaatcaatatttttcatgtcctgtgtaaatctcgtattgggataaaagatacatatatattttttaggttttggctaatagttttccgttggcagcatgtgaacctttttatgccatttttactttcatcaagggtgtatgtatgattttctcatactcttgtcagaactggagatttggggtaactttgccagtgtaatagactttcttaattcattaaggagtattttatcttagtttgcccatgagagaagagagattaaatttgttttattataccaagaacatggcagtcaataagcataactaaaaatattatttagcttttgattctgaagaccatgtatggccagtaaggaaaagaggtaaagatgtagaaaactgttttcttttttttctttcttttttttttttttttttttttttgagatggagtcttgctctgtcgccaggctggagtgcagtggcgtaatctcagctcactgcatcctccacctcctgggttcaagtgattcccctgccttagcctcccgagtagctggtactacaggcgcgtgccaccacacctggctaattttttgtattttagtagaaacagggtttcaccgtgttggccaggatggtctcaatctcctgacctcgtgatccacctgcctcagcctcccaaagtgctgggattacaggtgtgagtgagccactgcacctggcctcttttttattaatttaagatacatgattttggctaaaactaatgaaaataaattgatgaaacttcaatgtagtggatcaagagactcatgaaattgatgagttagattgttgtgggcacctgttttaaatttatggtgcctttttagcagaatcatgactttatcaactctttttcacatacttttattcaaagaagacattctcctcctctgccccaacttatcttcttcttgtctccaactgccagtattctcatccacactctttgtagttttgaggtgtgagataactcccaagttcttcttgggaatgggtagagtttaattctgagtctacatgtcgtgagtctattggaagaagcttttcttaggaggtgaaatttgggatggagttctcctctacactctagccctgtagccacaatctttggtttagatctttggcattttttgttggacatctttcatagtgtctacctcttcttcctgcctctaggcttcccgcggttgccagatgaaattccgaaaactcaaatcattcctgtagttaatattcttcagtgactccggaacaatcaaattcttgatccctccacatgggtcttaccatctgccctcgtgccctctctagcttcctgcatattgagttccccacagccctagtttccctgagtttggaatattctttcacatttgctcatcccactatctagaaacttcctacaatctctctactgccaacctgtctgtctagttgctaatttattttaaaacccagcttaagcaacacatccttttggatgtgttacttccctgatcgttattcacctccatgccgtctttcgctcaactcattgaagttaggtgcccctcttctgggctgccacggctctccatgttcacctatgtactgtactttgtattgtaatcagtttaattgacccccctacttatttgagctccttgagagcagggccttgattcctgctccttagcactccaccctccccagaactaacatggtatagcttataggaggcaccctataaatgtttaatgaatgtttgaatgcaaaagtgtatctaactttcttaatgatatatttatgaaaagaacttgctgagaaaaaggtcagttagaaagggttaggaacttgtcagtattctaaatccctctttttcaaaagcatacacatttaggaatgactgccttgctttaagaatttgtagggttttgttcacctgagttgtaccttgctgtcacagaaggatgccctgcagtggtctcgccatccagctacagtggagggagaggagccagaggacacggctgatgtggagagctgtgggtctaatgaagccagcactgtgagtggtgaaaacgatggtaaggaccctttaatggatgggtgagggagccacagcaggcactagggactaacctttattttcctctcttccagtatctcttgatgaaacatcttcgaacgcatcctgttctacagaatctcagagtcgacctctttccaatcccagggacagctacagagcttcctcacaggtaaggaagaggtagagcctagcctgggaggatgaatgatgacaggtataaggcaagatccctccttctcctgtagtgagctgtgaacatgttcagagagtgaagaatagaagtctggtctccagctgttagtagcatttaacagggggccgcaggaaaagtgaacagtaggtttgagcagagtaagttttttctctttctttaccttggctgagtgattttgttcattctttttttttttttttttttttttttttgagatggagtcgcgcctgtcgctcaggctggagtgcagtggcatgatctccgcttactgcaacctctgcctctggggttcaagcaattctcctgcctcagcctcccgagtagctgggattacaggcacgtaccaccgtgcctggctaatatttgtatttttagtagagatagggttttgccatgttggccaggctagtctcgaattcctgacctcaagtggtctgtccacctcagcctcccaaagtgctgggattacaggtgtgagtcaccatgcctagcctgattctgttcattcttgtaatatacacgtgaacattcagggagaagtgtggttagtgcagagtagagagaacaggagattgggagtgagcagtttgaatgataaccctgcacttactagccttgagacttggggaaaattccttacctgtaaaatggggataacagtacatttttgtagcttggaatgatgcttggcacagtgaccagcacgtagctcagtaacattaaccagtgctcttgtcagcattatttgacagatctggttgaagacgaacttcattttacaagagcgtgagtagagatagtgtcgccagggaatgcttttgtggctctgcagttgacttgggctctcttttgttctctcttggaacgcaggcgaacaaacaaaagaaaaagactggggtgatgctgcctcgagttgtcctgactcctctgaaggtaaacggggcccacgtggaatctgcatcaggtatgtgtaaactcatggttgtgatgctttttcctcaggtcctggggacctggcctccctctgtcagcagtttctgacctaatagtgcgatactaggagagctgtcgggccacaggcaagagccctgccaatggatgaggcctgccataggttctagtgctgggctctgctgtgtgccttcctctttgtctcccagggcagtcgtgaggatccaacggaggatttgattatgccagtgctttgtaaaaggtgtagtgctatacaaataaagatggcagtttggcacctgtaaggtgatattttaaagccagaccatgaagtggtggtttctctcagcctaaggctgggagatggaagcatcccagtattgctggcagcatctcagggagagctgggagaaatgagcttgtctgagagccatgggcgcggcttggtgatacttttgaccagtggaatgctgtgccttcagggttctcgggctgccacgccgatggcgagagcggcagcccgtccagcagcagcagcggctctctggccctgggcagcgctgctattcgtggccaggccgaggtcacccaggaccctgccccgctcctgagaggcttccggaagccagccacaggtgagtggcgtggcacttatttctctgcctgtaaagggggcccctgcaggcctagtgagaagatgatgtcttctattccaattcctttaccagtttatttttacttcttgggtggccctctattttttgtttatttttactttgtaatttgcttatttcatttgtagctctctgctaaactgtgagaactcctttcaggcagagatgatgccatactgtttctcgtatgtccctgtaggcctagtctatgcctgccttgtactgcatagtaagtgtttgagtgagtgaaaactgcttctgagcttctcagtgaagaattccaacaccccttttctctcttcggtagcatgttgccacatttgttcccaacatctgtagtctgtatcagacgctcccttttttacaacctagtcagtatgttgagtggaagcatgtgttgaattttggggatgcaaacaaattcagtagtgctattatctatacctcccacccctcaccccaccccacccccattagggttatttgcaatattagtatgctctttgctatttcaggatttaattcttaatgacccacatgctggttttttttgtagatgaaaccattaagaagacaagcttttgcttctgagaattagagtaaacctttgcccatgtgagaactaggtttgctgtcttgctgcttttccagctcatcagcagtgctcaatctaaggtctcacaggtctctagtcctagtgagtttttcagataaaagtaacatttgctgaggcttctgtgagaggtattagcatctcagttggctttgaacagtccttagtacatttctgcatggagatcatccctctccagcccattcacagaaggcttctgcagatttttctatagtatactaactagatttacttttagataattctcatgatttctccagttgagctttgtggagcctgttctccagctttggagggaagctcagaacctgccccttgcctgattttctgtgggaagtgtccttttcaggctgtgacacagcacggtacagagttttgtctgaggagatgcaaccccaagtgttctcctgggtttgatggcaatgacagtaacctggaaagaatatacaggttaggatggactggacaattgagcagattgtgtgcagataactcctgggtagcttgggtgctgtcaccaaagttttcccatcagttggcatttgttttttcttttaaaaagctgaaatctataccttgcttcaaaaatcataggtcaaatgaagcgcaacagaggggaagaaatagattttgagacacctgggtccattcttgtcaacaccaacctccgtgccctgatcaactctcggaccttccatgccttaccatcacacttccagcagcagctcctcttcctcctgcctgaagtagacagacaggtgcacatgggcagcctcccctttgcctctctctgggtgggcttctgttctcttttaagtttatttattaggatttttttcccccttgatccttctaggtggggacggatggcctgttgcgtctcagcagcagtgcactaaataacgagttttttacccatgcggctcagagctggcgggagcgcctggctgatggtatgtagacttggtcatctcggacggcttgcgacgcacctgtcgtgtggtgttgcatgtctcctggtatttaaaacccaagctcgctcttctcaaagggttatttagtataagacaggctttcctcattactaataaatgtggtgggtattaatatgccacacagctctgaagaaataacagggtgtttaggtttagactttcactatattgtatgtatgtactcattcatcatctcctttttatcattaaaactataaacacctattccagtaatcatggcatggtctggaagggtggaggaaagtacactgtggagttgagaagctccaccatgctctgtctttttaggcattgtcacttggagtgattgttagcttctattaatttaattttgtggggaaagtgttgagagggctctaagaacacccctaggtttgatgatttgctagcaggactcagcatatagttatatgtacagggctgcggtttattacagcagaagaatacaaagtaaaatcagcagatggagaggcacatggggtggggtccaggggaaaccatgtgttggcttccaaggtcctctctcagtggtgtcacacaggacacatttaattcccccagtaacaagttatgataacatgtatgaaatgtctactagggaaacctgttaaagactcggtgcccagggtttttatcaagggctgatcatgtaggaagccactgcttggcacatacccagcttccagattcccaaaaggaaggcaggtgttcagcataagccgtattgtttgcataaacaatttaggcacagtgaacaactcatatcagttagggtggttgggaaccctcctgaaatctaagttcccagatgtcagccaagggctgttcttttaagtaggcctttctaagagtaaacaatcaggcctacctactatgttaactttttatctacacaggaaatatgaatggttcttttgtttgttgttttgctttttcgatcaaggagttgcttggtctcactttaaggaagagtgaatttcccttatagtagatgtgttagctctgtccctataagagcatgatgtgagagagcctttagaagagacgtgttgttttaaaactgggagattcagctgtccataagacagacattaatatcccgaatgcacttactagaagaggtttatttctccctaggtgaatttactcatgagatgcaagtcaggatacgacaggaaatggagaaggaaaagaaggtggaacaatggaaagaaaagttctttgaagactactatggacagaagtaaggcagttggagctatgagtcctggtctggggttttgaggggatagaggtagatggtctcaaaatagcatatacttatgtgttggacaagaatgtggagattgcagtgacacttgggtcatttatcttaatgccattcatagtgaagctaacagaagtttttccatggttagattgtgcaccacacagatttattttgttctgagatatctgtgtttctgggtccatattattcatagaaataagagacatgtccactctggcctgaaactgatggctgtgattttgatttgcaggctgggtttgaccaaagaagagtcattgcagcagaacgtgggccaggaggaggctgaaatcaaaagtggcttgtgtgtcccaggagaatcagtgcgtatacagcgtggtccagccacccgacagcgagatgggcattttaagaaacgctctcggccagatctccgaaccagagccagaaggaatctgtacaaaaaacaggagtcagaacaagcaggggttgctaaggatgcaaaatctgtggcctcagatgttcccctctacaaggatggggaggctaagactgacccagcagggctgagcagtccccatctgccaggcacatcctctgcagcacccgacctggagggtcccgaattcccagttgagtctgtggcttctcggatccaggctgagccagacaacttggcacgtgcctctgcatctccagacagaattcctagcctgcctcaggaaactgtggatcaggaacccaaggatcagaagaggaaatcctttgagcaggcggcctctgcatcctttcccgaaaagaagccccggcttgaagatcgtcagtcctttcgtaacacaattgaaagtgttcacaccgaaaagccacagcccactaaagaggagcccaaagtcccgcccatccgggtaggagactgtttgattcctggctgccctggagccaggttttctttgagggtcatgagattatagagcccttaactctggggccctgaagttaattatgtgggaatgtagagctttttatgagaggtttgcttgagacagccttcaagtttagtgagataggttcttttcttcctcacttttttgttcactctgttgaagttatcttgagaggtcaaaatcctttggggttttaaaatctttttaagatagcattagattctttgctatagtgactcacacagtcccaccagaaattaaatttagaagtgtggcatataacagcccttgagcagaatcttctctgaatggtgtgttatggcgccattttactatgatgatttcattgttttaaggaaattatttgattctgtatgccatgacccttaagctactagaatcctagttttgctttacagtccctaggtcagatcacccagtcagttaaaactattttctaattctttttttgcagattcaactttcacgtatcaaaccaccctgggtggttaaaggtcagcccacttaccagatatgcccccggatcatccccaccacggagtcctcctgccggggttggactggcgccaggaccctcgcagacattaaagcccgtgctctgcaggtccgaggggcgagaggtcaccactgccatagagaggcggccaccactgccatcggaggggggggtggcccgggtggaggtggcggcggggccaccgatgagggaggtggcagaggcagcagcagtggtgatggtggtgaggcctgtggccaccctgagcccaggggaggcccgagcacccctggaaagtgtacgtcagatctacagcgaacacaactactgccgccttatcctctaaatggggagcatacccaggccggaactgccatgtccagagctaggagagaggacctgccttctctgagaaaggaggaaagctgcctactacagagggctacagttggactcacagatgggctaggagatgcctcccaactccccgttgctcccactggggaccagccatgccaggccttgcccctactgtcctcccaaacctcagtagctgagagattagtggagcagcctcagttgcatccggatgttagaactgaatgtgagtctggcaccacttcctgggaaagtgatgatgaggagcaaggacccaccgttcctgcagacaatggtcccattccgtctctagtgggagatgatacattagagaaaggaactggccaagctcttgacagtcatcccactatgaaggatcctgtaaatgtgacccccagttccacacctgaatcctcaccgactgattgcctgcagaacagagcatttgatgacgaattagggcttggtggctcatgccctcctatgagggaaagtgatactagacaagaaaacttgaaaaccaaggctctcgtttctaacagttctttgcattggatacccatcccatcgaatgatgaggtagtgaaacagcccaaaccagaatccagagaacacataccatctgttgagccccaggttggagaggagtgggagaaagctgctcccacccctcctgcattgcctggggatttgacagctgaggagggtctagatcctcttgacagccttacttcactctggactgtgccatctcgaggaggcagtgacagcaatggcagttactgtcaacaggtggacattgaaaagctgaaaatcaacggagactctgaagcactgagtcctcacggtgagtccacggatacagcctctgactttgaaggtcacctcacggaggacagcagtgaggctgacactagagaagctgcagtgacaaagggatcttcggtggacaaggatgagaaacccaattggaaccaatctgccccactgtccaaggtgaatggtgacatgcgtctggttacaaggacagatgggatggttgctcctcagagctgggtgtctcgagtatgtgcggtccgccaaaagatcccagattccctactgctggccagtactgagtaccagccaagagccgtgtgcctgtccatgcctgggtcctcagtggaggccactaacccacttgtgatgcagttgctgcagggtagcttgcccctagagaaggttcttccaccagcccacgatgacagcatgtcagaatccccacaagtaccacttacaaaagaccagagccatggctcgctacgcatgggatctttacatggtcttggaaaaaacagtggcatggttgatggaagcagccccagttctttaagggctttgaaggagcctcttctgccagatagctgtgaaacaggcactggtcttgccaggattgaggccacccaggctcctggagcaccccaaaagaattgcaaggcagtcccaagttttgactccctccatccagtgacaaatcccattacatcctctaggaaactggaagaaatggattccaaagagcagttctcttcctttagttgtgaagatcagaaggaagtccgtgctatgtcacaggacagtaattcaaatgctgctccaggaaagagcccaggagatcttactacctcgagaacacctcgtttctcatctccaaatgtgatctcctttggtccagagcagacaggtcgggccctgggtgatcagagcaatgttacaggccaagggaagaagctttttggctctgggaatgtggctgcaacccttcagcgccccaggcctgcggacccgatgcctcttcctgctgagatccctccagtttttcccagtgggaagttgggaccaagcacaaactccatgtctggtggggtacagactccaagggaagactgggctccaaagccacatgcctttgttggcagcgtcaagaatgagaagacttttgtggggggtcctcttaaggcaaatgccgagaacaggaaagctactgggcatagtcccctggaactggtgggtcacttggaagggatgccctttgtcatggacttgcccttctggaaattaccccgagagccagggaaggggctcagtgagcctctggagccttcttctctcccctcccaactcagcatcaagcaggcattttatgggaagctttctaaactccaactgagttccaccagctttaattattcctctagctctcccacctttcccaaaggccttgctggaagtgtggtgcagctgagccacaaagcaaactttggtgcgagccacagtgcatcactttccttgcaaatgttcactgacagcagcacggtggaaagcatctcgctccagtgtgcgtgcagcctgaaagccatgatcatgtgccaaggctgcggtgcgttctgtcacgatgactgtattggaccctcaaagctctgtgtattgtgccttgtggtgagataataaattatggccatgggaaacattgtatatttagtgtgtgtattttgataatgattgatcttaaatctgtatacagaatatcattgatataatactctttaggcaggagcactcttgccttcccccaaaatttacactgctaaagccctctgtcacttggcgacccttctggtcttgctggaggggtttcctgggtataacccattgggctgcccaaggccagccagcctgagctctcctgcaagacagagcctgatgtggcacggagtggggttgcggggggtggggggactgcctgactcccagagggacttgaaactgaagcaagaaggttgcattctccaccaagggagttaacctacctgaactaagtagaaatgccagtcttccactaccccctccctgccatcttttcttctgctactttggggagttgatggccaggaaagaagccagcacagggttaaagtaactcctggcattgcccaccagggggctggtgcacctgctgacctcagggtcacagttgagtcatttgccagttgacggagcaagtttgaccttggttctgttgctgaagcaaatttggaacttttctgtctcagtgtgatccactaacccacaggatcatttggaaccttgaatagctctgcttggacaatggggttggggaatagggttgtctttcctatgaaaatgccatctgtagaccttgtgagtcagccgtccagatgtttgcaggtgaattcctctgcttgacatcctccctgtcactttggaccctatgggagtgggcatctccacgcacctgtgtatgtgaaagtcattttacatttcaaagcagtgtgtgtttcttatttttatatttttaactctttattcttggatgtataaagtgaactttttggcttctgtaagtatgctctatgcacctctaatgttttatcatgtatttatatgttgtacacagtactggctgattctgtaaatggatgtattgtacagagaacatgaacgtctcttcctaattttacatcttcagcatcattgcattaaagtggtgtaatctccttctctacatctgttgtcagagccactgagtgctgtgctgctcgacgtgagggtgaaatgattgacttgtgacctgccaggttgcccgatgccctgttgggtcaccggctggacctgctgcagcctgcagagccacagtcagcctgcccacatgccaccgagcaaacgcatcttgcttttcacatctctcctcctacagccttaatggctgcttgctgccatatgtgacaaatcaccaccaccagtgttaagtgcttctggattcatgggtgagttccctgggcagcccccaggaaggccttccagatctggctccagggtcaccacctgtcacagcaatacctgggaccatgctctcctgggactgtgaggctccttttgacgtacttttgacatcaggcaggtttgggaagaaacaaagccatgcctgctcctgcctctctcccaacatgtttccagcaagtagatgcccctgtgtgtgttttcccttgccttgtttcctgccttatatcttgtatttcgacttattacagagttgagggttcttgcttaatttagatcaagtataaaatttgtatgacttcaagtctcattttatctgaaaggtttttttctcatttaatctgatgtggcattttcgtcatctgaagcatgagtgacaagttgggaatgatgtggtgatttagaatgcagtattggccaagtccaagttgtcaacttaagcgtctgtttaccaaagaccgggaacaggggcccaaacatgtccagtcctcttcttccctctgctggaacctttggggacactcaagggtacagtttgacactgatctggtccatgaggctgcccagagaaagcactgcttctgtatgtctcttgtggtattggaacaataaacccgtacaacctgcagttgtggtctcagtcatctgtggctgcctcgctggtgtgggaaggtcagctggagtgctgagctggaagggaaggagtagacgccagctctcctcaccttggctctggagctactcttcttatacttggagctcttcttttgggaggttagtccaaaaggaatgacttggcagcttcactggtctttagccattcatgacttggcggacttcaccacatagactgcagtcagcgttctactgagagcaatgagaatgtttccccttgggagtgcgagtcacaaactgtgacatccctctgcagcaactcatccaaacagcttcactgaggttgaggttgccaagtggcttcctaatggttagtggtcttctgtgggagggtgactagctctaaccttggaaaaccttaaccacaagcacctctttctgtagcctctggtggcagtgagaggaaggtgctggcccagggtggggtgtctgatgctagttgcgtgagcctgagtagacgacgtgcttcagggattgacttcttgagaagtcctcagacgtctctagagtacgtaaatacattgactttgtgcttatcagaaataattttattagtatataaataagccaaaacagcaaaatgatgggagtttaaacatatattcattaattttttcctgtgaattggaggaaaaactttgtggtgggatatcctttggggagttcaagctgccattttgtattgctgccgtttgatcgacatgcagttttgagaattgatggttcggaggccctgtagtgactgagcaactgcctgctgttggtgatatgtccttgtgtcacagaatccatttgcccacttatgtctgcaggagctcagaatgcattacggtcccagatcgggaccttccaatgcctgttgcctctcctcagggaggcagaatggtgtagtgagttcctagagtatagcctctgcgacgtgccagctctgtgttcttgggccatgttatttaaccaggctgccaactctcatatatgaatgggtgtaatagttcttacttcatgaggttgttagtgcctgccacctaggacataatgactattagttcacagcaggccaaggcaataattgttaggtgaacttatagtagaaatctatacagctactgccagctacttcactcttgctccagaaaggagctgtcaggatgtaggccttgtgcccactgcgctgaggggtgatgcaggctgtgaagtcactttggaccctggcttttggtctcaggccacagacctgaccaaaggttgagtgtagtcctgagtttagactgaatatttggtcaggaaggcttattttgctcatggtccaaaggacaagggaaataatgtttcagaatataggaagaatggtactggcctggcaaggtgtcatttatttgctatccagcctgctgtaagactgtgttagagtgtgtgtgggtatgtgtgcatgctaaatagagctgcctgcatccatcaggggtcttgatggccaaagcatctgcctgccctgtctccctgagaggaggggacccaggctgtgttgccctcgtgtgggtgttgtttgaagccatagaagtggcaggatgtggaactttggagattgctccaaaattggacaacacccctatgcttcctcttgtctctggtcaatttgaaagcctagaatgaacatctctaccgtaagccatagacgaacgccctgtgagaacaacagttgtcagtgctgtgttacctgatatgggtgggtcttaacctttttttgggaactctccccccatggaatgcacatacaaagttttttggggtttttttgcagactctcactctcttcaggctggagtgcagtggcgtgatcatagctcactgtagcctcgaactcctgagctccagtggtccttccacctcatcctcccaagtagctcaggctacaggcacgtgccaccatgcccagctaatattaaaattttttgt

SEQ ID NO: 59 - DNA, 1084 bp, Homo sapiens
cacacccacggcagacacgcacgcacccgggcgccgaagggaaagccgcgtctcgccctcccgccccgccgtcggtcctgtctcagtccctcagcagagcgggaaagcggaggccggagccgtgacctctgaccccgtggttatgcggagccgccgcattccttagcgatcgcggggcagccgccgctgccgccgtgggcgactgacgcagcgcgggcgcgtggagccgccgccgcccctcccccaccgccgctctcgcgccagccggtccccgcgtgcccgccccttctccccggccgcacccgagacctcgcgcgccgccgctgccacgcgccccccccaccgccgccgccgccccagccccgcgccaccgccccagcccgcccagcccggaggtcccgcgtggagctgccgccgccgccggggagaaggatgaaggacaaacagaagaagaagaaggagcgcacgtgggccgaggccgcgcgcctggtattagaaaactactcggatgctccaatgacaccaaaacagattctgcaggtcatagaggcagaaggactaaaggaaatgagaagtgggacttcccctctcgcatgcctcaatgctatgctacattccaattcaagaggaggagaggggttgttttataaactgcctggccgaatcagccttttcacgctcaaggtgtgagccactgcaccaggccccttcatcttaattttaatatatctttgaataaacaccattgtatgaacctgctgtaagcttgggagtggtctgttagtctacagcttgtgtctgagatgtgctaattgaatatttgctcagtacctcatcttaactgcctttggctttatgttgcttatccttcatagtatcttgttcattggccttttacatccataggcatcacttctctgatattcgttgtgctcttttaatggattaatggtttgcttggttggttcctctagttagactgtaaactccttgagagcagagtctgtattttattaattacccacagtactaggtacatagttgccttcaataaatatatatttaatgaaaaaaaaaaaaaaaa

SEQ ID NO: 60 - protein, 85 aa, Homo sapiens
MKDKQKKKKERTWAEAARLVLENYSDAPMTPKQILQVIEAEGLKEMRSGTSPLACLNAMLHSNSRGGEGLFYKLPGRISLFTLKV

SEQ ID NO: 61 - DNA, 7056 bp, Homo sapiens
cacacccacggcagacacgcacgcacccgggcgccgaagggaaagccgcgtctcgccctcccgccccgccgtcggtcctgtctcagtccctcagcagagcgggaaagcggaggccggagccgtgacctctgaccccgtggttatgcggagccgccgcattccttagcgatcgcggggcagccgccgctgccgccgtgggcgactgacgcagcgcgggcgcgtggagccgccgccgcccctcccccaccgccgctctcgcgccagccggtccccgcgtgcccgccccttctccccggccgcacccgagacctcgcgcgccgccgctgccacgcgccccccccaccgccgccgccgccccagccccgcgccaccgccccagcccgcccagcccggaggtcccgcgtggagctgccgccgccgccggggagaaggatgaaggacaaacagaagaagaagaaggagcgcacgtgggccgaggccgcgcgcctggtattagaaaactactcggatgctccaatgacaccaaaacagattctgcaggtcatagaggcagaaggactaaaggaaatgagaagtgggacttcccctctcgcatgcctcaatgctatgctacattccaattcaagaggaggagaggggttgttttataaactgcctggccgaatcagccttttcacgctcaagaaggatgccctgcagtggtctcgccatccagctacagtggagggagaggagccagaggacacggctgatgtggagagctgtgggtctaatgaagccagcactgtgagtggtgaaaacgatgtatctcttgatgaaacatcttcgaacgcatcctgttctacagaatctcagagtcgacctctttccaatcccagggacagctacagagcttcctcacaggcgaacaaacaaaagaaaaagactggggtgatgctgcctcgagttgtcctgactcctctgaaggtaaacggggcccacgtggaatctgcatcagggttctcgggctgccacgccgatggcgagagcggcagcccgtccagcagcagcagcggctctctggccctgggcagcgctgctattcgtggccaggccgaggtcacccaggaccctgccccgctcctgagaggcttccggaagccagccacaggtcaaatgaagcgcaacagaggggaagaaatagattttgagacacctgggtccattcttgtcaacaccaacctccgtgccctgatcaactctcggaccttccatgccttaccatcacacttccagcagcagctcctcttcctcctgcctgaagtagacagacaggtggggacggatggcctgttgcgtctcagcagcagtgcactaaataacgagttttttacccatgcggctcagagctggcgggagcgcctggctgatggtgaatttactcatgagatgcaagtcaggatacgacaggaaatggagaaggaaaagaaggtggaacaatggaaagaaaagttctttgaagactactatggacagaagctgggtttgaccaaagaagagtcattgcagcagaacgtgggccaggaggaggctgaaatcaaaagtggcttgtgtgtcccaggagaatcagtgcgtatacagcgtggtccagccacccgacagcgagatgggcattttaagaaacgctctcggccagatctccgaaccagagccagaaggaatctgtacaaaaaacaggagtcagaacaagcaggggttgctaaggatgcaaaatctgtggcctcagatgttcccctctacaaggatggggaggctaagactgacccagcagggctgagcagtccccatctgccaggcacatcctctgcagcacccgacctggagggtcccgaattcccagttgagtctgtggcttctcggatccaggctgagccagacaacttggcacgtgcctctgcatctccagacagaattcctagcctgcctcaggaaactgtggatcaggaacccaaggatcagaagaggaaatcctttgagcaggcggcctctgcatcctttcccgaaaagaagccccggcttgaagatcgtcagtcctttcgtaacacaattgaaagtgttcacaccgaaaagccacagcccactaaagaggagcccaaagtcccgcccatccggattcaactttcacgtatcaaaccaccctgggtggttaaaggtcagcccacttaccagatatgcccccggatcatccccaccacggagtcctcctgccggggttggactggcgccaggaccctcgcagacattaaagcccgtgctctgcaggtccgaggggcgagaggtcaccactgccatagagaggcggccaccactgccatcggaggggggggtggcccgggtggaggtggcggcggggccaccgatgagggaggtggcagaggcagcagcagtggtgatggtggtgaggcctgtggccaccctgagcccaggggaggcccgagcacccctggaaagtgtacgtcagatctacagcgaacacaactactgccgccttatcctctaaatggggagcatacccaggccggaactgccatgtccagagctaggagagaggacctgccttctctgagaaaggaggaaagctgcctactacagagggctacagttggactcacagatgggctaggagatgcctcccaactccccgttgctcccactggggaccagccatgccaggccttgcccctactgtcctcccaaacctcagtagctgagagattagtggagcagcctcagttgcatccggatgttagaactgaatgtgagtctggcaccacttcctgggaaagtgatgatgaggagcaaggacccaccgttcctgcagacaatggtcccattccgtctctagtgggagatgatacattagagaaaggaactggccaagctcttgacagtcatcccactatgaaggatcctgtaaatgtgacccccagttccacacctgaatcctcaccgactgattgcctgcagaacagagcatttgatgacgaattagggcttggtggctcatgccctcctatgagggaaagtgatactagacaagaaaacttgaaaaccaaggctctcgtttctaacagttctttgcattggatacccatcccatcgaatgatgaggtagtgaaacagcccaaaccagaatccagagaacacataccatctgttgagccccaggttggagaggagtgggagaaagctgctcccacccctcctgcattgcctggggatttgacagctgaggagggtctagatcctcttgacagccttacttcactctggactgtgccatctcgaggaggcagtgacagcaatggcagttactgtcaacaggtggacattgaaaagctgaaaatcaacggagactctgaagcactgagtcctcacggtgagtccacggatacagcctctgactttgaaggtcacctcacggaggacagcagtgaggctgacactagagaagctgcagtgacaaagggatcttcggtggacaaggatgagaaacccaattggaaccaatctgccccactgtccaaggtgaatggtgacatgcgtctggttacaaggacagatgggatggttgctcctcagagctgggtgtctcgagtatgtgcggtccgccaaaagatcccagattccctactgctggccagtactgagtaccagccaagagccgtgtgcctgtccatgcctgggtcctcagtggaggccactaacccacttgtgatgcagttgctgcagggtagcttgcccctagagaaggttcttccaccagcccacgatgacagcatgtcagaatccccacaagtaccacttacaaaagaccagagccatggctcgctacgcatgggatctttacatggtcttggaaaaaacagtggcatggttgatggaagcagccccagttctttaagggctttgaaggagcctcttctgccagatagctgtgaaacaggcactggtcttgccaggattgaggccacccaggctcctggagcaccccaaaagaattgcaaggcagtcccaagttttgactccctccatccagtgacaaatcccattacatcctctaggaaactggaagaaatggattccaaagagcagttctcttcctttagttgtgaagatcagaaggaagtccgtgctatgtcacaggacagtaattcaaatgctgctccaggaaagagcccaggagatcttactacctcgagaacacctcgtttctcatctccaaatgtgatctcctttggtccagagcagacaggtcgggccctgggtgatcagagcaatgttacaggccaagggaagaagctttttggctctgggaatgtggctgcaacccttcagcgccccaggcctgcggacccgatgcctcttcctgctgagatccctccagtttttcccagtgggaagttgggaccaagcacaaactccatgtctggtggggtacagactccaagggaagactgggctccaaagccacatgcctttgttggcagcgtcaagaatgagaagacttttgtggggggtcctcttaaggcaaatgccgagaacaggaaagctactgggcatagtcccctggaactggtgggtcacttggaagggatgccctttgtcatggacttgcccttctggaaattaccccgagagccagggaaggggctcagtgagcctctggagccttcttctctcccctcccaactcagcatcaagcaggcattttatgggaagctttctaaactccaactgagttccaccagctttaattattcctctagctctcccacctttcccaaaggccttgctggaagtgtggtgcagctgagccacaaagcaaactttggtgcgagccacagtgcatcactttccttgcaaatgttcactgacagcagcacggtggaaagcatctcgctccagtgtgcgtgcagcctgaaagccatgatcatgtgccaaggctgcggtgcgttctgtcacgatgactgtattggaccctcaaagctctgtgtattgtgccttgtggtgagataataaattatggccatgggaaacattgtatatttagtgtgtgtattttgataatgattgatcttaaatctgtatacagaatatcattgatataatactctttaggcaggagcactcttgccttcccccaaaatttacactgctaaagccctctgtcacttggcgacccttctggtcttgctggaggggtttcctgggtataacccattgggctgcccaaggccagccagcctgagctctcctgcaagacagagcctgatgtggcacggagtggggttgcggggggtggggggactgcctgactcccagagggacttgaaactgaagcaagaaggttgcattctccaccaagggagttaacctacctgaactaagtagaaatgccagtcttccactaccccctccctgccatcttttcttctgctactttggggagttgatggccaggaaagaagccagcacagggttaaagtaactcctggcattgcccaccagggggctggtgcacctgctgacctcagggtcacagttgagtcatttgccagttgacggagcaagtttgaccttggttctgttgctgaagcaaatttggaacttttctgtctcagtgtgatccactaacccacaggatcatttggaaccttgaatagctctgcttggacaatggggttggggaatagggttgtctttcctatgaaaatgccatctgtagaccttgtgagtcagccgtccagatgtttgcaggtgaattcctctgcttgacatcctccctgtcactttggaccctatgggagtgggcatctccacgcacctgtgtatgtgaaagtcattttacatttcaaagcagtgtgtgtttcttatttttatatttttaactctttattcttggatgtataaagtgaactttttggcttctgtaagtatgctctatgcacctctaatgttttatcatgtatttatatgttgtacacagtactggctgattctgtaaatggatgtattgtacagagaacatgaacgtctcttcctaattttacatcttcagcatcattgcattaaagtggtgtaatctccttctctacatctgttgtcagagccactgagtgctgtgctgctcgacgtgagggtgaaatgattgacttgtgacctgccaggttgcccgatgccctgttgggtcaccggctggacctgctgcagcctgcagagccacagtcagcctgcccacatgccaccgagcaaacgcatcttgcttttcacatctctcctcctacagccttaatggctgcttgctgccatatgtgacaaatcaccaccaccagtgttaagtgcttctggattcatgggtgagttccctgggcagcccccaggaaggccttccagatctggctccagggtcaccacctgtcacagcaatacctgggaccatgctctcctgggactgtgaggctccttttgacgtacttttgacatcaggcaggtttgggaagaaacaaagccatgcctgctcctgcctctctcccaacatgtttccagcaagtagatgcccctgtgtgtgttttcccttgccttgtttcctgccttatatcttgtatttcgacttattacagagttgagggttcttgcttaatttagatcaagtataaaatttgtatgacttcaagtctcattttatctgaaaggtttttttctcatttaatctgatgtggcattttcgtcatctgaagcatgagtgacaagttgggaatgatgtggtgatttagaatgcagtattggccaagtccaagttgtcaacttaagcgtctgtttaccaaagaccgggaacaggggcccaaacatgtccagtcctcttcttccctctgctggaacctttggggacactcaagggtacagtttgacactgatctggtccatgaggctgcccagagaaagcactgcttctgtatgtctcttgtggtattggaacaataaacccgtacaacctgcaaaaaaaaaaaaaaaaaa

SEQ ID NO: 62 - protein, 1541 aa, Homo sapiens
MKDKQKKKKERTWAEAARLVLENYSDAPMTPKQILQVIEAEGLKEMRSGTSPLACLNAMLHSNSRGGEGLFYKLPGRISLFTLKKDALQWSRHPATVEGEEPEDTADVESCGSNEASTVSGENDVSLDETSSNASCSTESQSRPLSNPRDSYRASSQANKQKKKTGVMLPRVVLTPLKVNGAHVESASGFSGCHADGESGSPSSSSSGSLALGSAAIRGQAEVTQDPAPLLRGFRKPATGQMKRNRGEEIDFETPGSILVNTNLRALINSRTFHALPSHFQQQLLFLLPEVDRQVGTDGLLRLSSSALNNEFFTHAAQSWRERLADGEFTHEMQVRIRQEMEKEKKVEQWKEKFFEDYYGQKLGLTKEESLQQNVGQEEAEIKSGLCVPGESVRIQRGPATRQRDGHFKKRSRPDLRTRARRNLYKKQESEQAGVAKDAKSVASDVPLYKDGEAKTDPAGLSSPHLPGTSSAAPDLEGPEFPVESVASRIQAEPDNLARASASPDRIPSLPQETVDQEPKDQKRKSFEQAASASFPEKKPRLEDRQSFRNTIESVHTEKPQPTKEEPKVPPIRIQLSRIKPPWVVKGQPTYQICPRIIPTTESSCRGWTGARTLADIKARALQVRGARGHHCHREAATTAIGGGGGPGGGGGGATDEGGGRGSSSGDGGEACGHPEPRGGPSTPGKCTSDLQRTQLLPPYPLNGEHTQAGTAMSRARREDLPSLRKEESCLLQRATVGLTDGLGDASQLPVAPTGDQPCQALPLLSSQTSVAERLVEQPQLHPDVRTECESGTTSWESDDEEQGPTVPADNGPIPSLVGDDTLEKGTGQALDSHPTMKDPVNVTPSSTPESSPTDCLQNRAFDDELGLGGSCPPMRESDTRQENLKTKALVSNSSLHWIPIPSNDEVVKQPKPESREHIPSVEPQVGEEWEKAAPTPPALPGDLTAEEGLDPLDSLTSLWTVPSRGGSDSNGSYCQQVDIEKLKINGDSEALSPHGESTDTASDFEGHLTEDSSEADTREAAVTKGSSVDKDEKPNWNQSAPLSKVNGDMRLVTRTDGMVAPQSWVSRVCAVRQKIPDSLLLASTEYQPRAVCLSMPGSSVEATNPLVMQLLQGSLPLEKVLPPAHDDSMSESPQVPLTKDQSHGSLRMGSLHGLGKNSGMVDGSSPSSLRALKEPLLPDSCETGTGLARIEATQAPGAPQKNCKAVPSFDSLHPVTNPITSSRKLEEMDSKEQFSSFSCEDQKEVRAMSQDSNSNAAPGKSPGDLTTSRTPRFSSPNVISFGPEQTGRALGDQSNVTGQGKKLFGSGNVAATLQRPRPADPMPLPAEIPPVFPSGKLGPSTNSMSGGVQTPREDWAPKPHAFVGSVKNEKTFVGGPLKANAENRKATGHSPLELVGHLEGMPFVMDLPFWKLPREPGKGLSEPLEPSSLPSQLSIKQAFYGKLSKLQLSSTSFNYSSSSPTFPKGLAGSVVQLSHKANFGASHSASLSLQMFTDSSTVESISLQCACSLKAMIMCQGCGAFCHDDCIGPSKLCVLCLVVR

SEQ ID NO: 63 - DNA, 71483 bp, Homo sapiens
atttttactttgtttctgaaattaattcttttttttttttttttttttttgagacagagctttgctctgccacccaggctggcatgcagtggcgcgatcttggctcactgcaacttccatctcccaggctcaagtgattcttgtgcctcaacctcccgagtagctgggattacaggcgggtgccaccatgcccggctaatttttgtatttttagttgagacagggttttgccatgttggccaggctggtcttgaactctgagctcaagcgatccacccacctcggcctcccaaagtgctaagattataggcgtgagccactgtgcctggcctaaaattaattctcagagtgtatgtttgaagattttgaactctatgattaaagacatgactcctaaaatgaacaaatcagtggatgacaataggtaaccctgaaatagatccaagcatatataaaaacttactaataaaggaagtatcagtaaccaattggaaacacacttttttgaaagaaattcaaactcactttatgccaaaataattccagataaatttgaatgtaaaaacacattttagccagaaaaatactagaagaaaacataaaattttagtcatatttaagtaatctcagaagtaataagaacgttttattttctgggtttttgttgttgttgttttttaagatatgaggtcctcgttttgctatgttacctttgctagtctggaactcctggcctcaagcaacccttccactttggcctcccaaagtgctggaattacaggcatgagccacaatacctggcttaaaaggacactgaggacattttaagcataaaaccactggaaatataacaaaggaaacttaaaaagatgttttaggatatttttatcccatgttttcttttagtatttaaaaaaaaacatatggccaggcgcggtggctcacgcctgtaatcccagcactttgggaggcagaggcgggcggatcacgaggtcaggagatcgagatcatcctggctaacatggtgaaaccccgtctctactaaaaatacaaaaactagcctggcatagtggtgtgtgcctgtaatcccagctactcggcaggctgaggcattagaactgcttgaacccgggaggcagagcttgcagtgagctgaaatcacaccactgcactccagcctgggcgacagagtgacagtctgtctcaaaaaaaaaaaaataataataataaataaataaaaattaaaacataaaaaatattctaatatctgtaggacaactaatcaccttctttttcaacatcttggctattcttatccattttctcttccagataaatgttggaatcaacttgtcaagtaaaaaaaaaagaatccagttggaattttgattaaagttatatttgtagattaatttgagaccaattgagttgttttctcatctagaaacatggtatgtttttacatttatttaggacttattttttctttagcaacgtttcctggttttcctcatattaattttatacatttcgtgctgagtaaattaattaatcaactcactcaacaactctttgtccgaggctcagagtgtacagcaatgaacaaggcaagttccctgttctcatggagcctatattctaattgggacaaataaacaaaaaagatcagctagtgagtagtcctctgcagataattaaaatagggttatgtgatagagagatattgggtggctacgttagattgggtggttaagaaagtcccttaatatttcaactgagatctgagtagcaagaagaatccagctttgtaaagctgctgggagtggggatggcatttcaaggagagggaaccgctaatgaaaaaaaaaaatcactaagtctcctaatagtttgatattttctgttcaaggaacagaaaaaaggccagtgaagctagcggtgagtggtgaaggggaaagtgttatgaaaagatgttagacaaacatttaggggccaaacagatgattcaggccttcataaggagtttgcatattattttatttttttgagacaaagtctctgttgcccaggcttcaaggtagtggtgtgatctgagctcactgcagcctctgcctcccaggttcaggtgattctcctgcctcagcctctccccctagtagctggaactacaagtgcacgccaccatgactggctaatttttgtatttttagaagtgacagtgttttgccatgttggccaggctggtctccactcctggccttaagtgatctgcccgcgttggcctcccaaagtgctggaataacaggtgtgagccactgtgcctggcctacattatattaaatgtgatggaagccatgtattgagtaaaagaatgacttgatctgattcatggtttttgaaagatcgctatagtacctagcggaaaaaggatagcagagggccaagagtgaaagaaagatttgtgaggaggcgagtgtagtggtccaggtaagaggtaatagtggccagatatggtggctcacacctgtagtcccagctactagggaggccgaggcacgagaattccttgatcccaggaggcagaggttgctagtgagccgagatcacgtcactgcactccagcctgggtgatggagggagactctgtctcaaaaaaaagaaaaaaaacagaacatatttatacacaaatggaaatgacccagaagaggagaaattagtctgggtgtggtgacatgtgccttaatctcagctacttgggggctaaagttggaggatcacttgaggtcaggagtttgaggctgcagtgagctataattgcgcctgtgaataatcactgcaccccagcctgggcatcatagaccccgtctttaacatttagaaagacagagagaaaggagagattgatgaggcaggagcaaggaggataattgttggagcagtaaaactcttgaaaaggagacagtatggaagatatggatagtatcttgaaaaataaagtggatgagaagtgacacgaatagtggaagaaacaaagacggtgggctatgaaaaatgatggggagataccagggatcagtagctgacagcatctcagagtagcagcagtctgcataaattttaaaagcacttgagtttctgagggaggaaggaagagaagtggtttggaggtaatatgaggaataggccacagataagaatacctatgagaggaaaaataacctcctgtacttgaaaagttgcaagggaggtagttttgctaagtgataaaccgggtttcagttggaatgggaagttgatgggaacatttacagaagaggctaagaataaaggggaagtggttgatggcagatgttgaaatcaaaagtgtgaagtgaaatggttaggatatttggtgaagagtgggatatggaatcagagtaattgaagcagagagtagcatggagatactagagcaataaacggatgacgcagatcctactggttgtgattgaggtggaaaggattataaagcatgatggaattatcttttggtaatctcttgggtcaaacgtggtgaacggtaagatgaataatatagagctacacaaaccgttcttgtgatatggaggctgctccctaattacaatgctaatatttcatttaggatttttgtattcatcgttacaaaacagggtctgtaggtttccttttagtgttcataatgcttaggttttactaacagggttatgattacctctccaaacaagctgggattttttttttcaagcgtttccatgccctggaaccatctggtctagtgctttttggggtaatgaatatcttcaattgtatttatttttacttagttgatctattcagattttctacattttcttgagctgattttgcttatttatatttttattgatataaagattttttctatttttatttcttgtgccaactgtatgtacattccccccattcccgtttccatactgtttttaggccatttgaaaatctcaaaggttttacaggaaagtacagattgatgaagaaatggccaaaaacgggaaaagtgaactttaaagtgattcaactacaaaacgtatgctactgagcaaatactagtgtattcctcgctctgcggcttaactccatgaaaatccgtgcaaaggttttagcgttgggattgtgaccgactcggtgaagagaggggacgatcaccaaaccgttagagcactggggctcttggcagtgtttgtcagttattttcaagtgataacttgaagtgataccgcaggaataaaatgctgtatccagagctggtcggaacgagcactacctttaacaaaagctgaaaagatctgcctaggaattcgttagaatacagccctcttacgtctctgacatacctagttatgtgaaccgagactgtgcagctgacggtggaaatttcctaagtgctttttaaacaacagaactggactccctccctcctccattcccagtcgaatacgtcccacccagatccagctcaagggtgcagcacttgttccggccagctcacaatcgccctttggaagggaggtttcccgccatttcgcttaggaggagggtgaactcttctcccttcattctccactcgctgggggcccgagcccacaccaccttcctagcaaagcaagcagcgggacgccaaggccagcaggccgcattaagaacgctggactgagccaaaagcctacacagaccaagccgctcgggaaaggatcaacaactgccgacaacccggagggcgaaaacgcccgcggcgtaggggaagcaaactaggagatgcgcgggcccagcgccagcggcgggaggaggcagcgcggccgtcgcaggcgggagcgaaggcggggacggagggcgggctcgctccactcgactccggattggtcgagcttagagagccgagtgacgtcagcgggggagaacgcctgatttgtgtggtgggcgcgggcggtggggggaagcgcagtgcgcaggcgcaactgcctggctctgctcgctccggcgctccggcccagctctcgcggacaagtccagacatcgcgcgcccccccttctccgggtccgccccctcccccttctcggcgtcgtcgaagataaacaatagttggccggcgagcgcctagtgtgtctcccgccgccggattcggcgggctgcgtgggaccggcgggatcccggccagccggccatggcggggctgtactcgctgggagtgagcgtcttctccgaccagggcgggaggaagtacatggaggacgttactcaaatcgttgtggagcccgaaccgacggctgaagaaaagccctcgccgcggcggtcgctgtctcagccgttgcctccgcggccgtcgccggccgcccttcccggcggcgaagtctcggggaaaggcccagcggtggcagcccgagaggctcgcgaccctctcccggacgccggggcctcgccggcacctagccgctgctgccgccgccgttcctccgtggcctttttcgccgtgtgcgacgggcacggcgggcgggaggcggcacagtttgcccgggagcacttgtggggtttcatcaagaagcagaagggtttcacctcgtccgagccggctaaggtttgcgctgccatccgcaaaggctttctcgcttgtcaccttgccatgtggaagaaactgggtaagttccctggcttgtttggcgcccgcccctttttcaggcagttcagggcttttatggcaccagccccgcgtgggcccccggcacccagagcgcaaccaaagtatacactgatggaagtgactaaaagctgtaatagcgctttgctgggtggaggtccgggcaaaccaagcggccttggggaagataggattgccgtctccctgcagcctattcttgctttatttccatcctccaaggatcaatgggaagcagtccactcccttccctgcttcactttggtggcaaccagaggaaacgtgtttgaaacctggcgccagattttggccaaaagataaatcgatgttgcacctgggccaggcgaaggaaaaactgtagtgtttccttagagaatctgtcataattctgctcctgaaagtcttatccctctcggttgcctcctaccggtggtgtcagttctccagattgacccgggattgctggggttggttgctggagtaaagcgtaagctaatttagaagggctgaaacgtaaccatccggcaacttaaagttttggaaggaattccgttgtaatgatggtgagatgtttttaggatcataaacctgtactgcttatgaaaactaaaaacgcggaacgtgttgttacctcttaaaaactggccccgtgttaagggtgtgcgttagattctgcttgggttttctttttggaaattgccttagctgattgctttcagatagttcccaaccggttgttcctagtttaaaaagtacttataaattgtaactgcccatcaaaataagaaaaggcaaggaattactgtatgctagaaggaaataaaggtcttaaatgtctaaaaatttcggtgtagttgtagtttcatctaagtttttttaaatgtttgtaaagcaggcaggatttctgtgcccaacatttacagaatcatcttacagcattataattgcttatctattgcagtgaataaatggcatgcatctttgttagagcaaagaagacaatacttccagtggtgggaaaaaaccttgtttatggcagcataataacgttgctttattttcagcagagggatagagacatagagaaaagagttagatttagcaaatacagaacatttttagaaaggtattgtcatagagttgtagattagccggtttcaaagtctgttttccatttgcttggctttctgccaagagttagttgattgactcaaaaaccagccactaggcttgttggaggcgtttcccatccatcccaggggcccctctttatggatttattttgtttttgtgtaggcaccgtagagctgaaagcactgtagtgtattgtagaaatatgtgatatcattgactgcagggcaacgagaagtcgacagcagcacaagagaggaagactaggcacagaactatttagagtgctgtttattttgcagtatacttggagtaacatgaatttgccatatgtttgaactttaaggataaaaaatctttaaggtataaactccgttacattagtattaaatttttttttttttaagagacgggcaggggcgggggacgggtgtgggccgccttactttgttgcccaggctgggcaacaagcgatcctgggctcaagcgatccttcctcctcggcctccgaaagtgctggaattacaggcgtgagctaccctgccggaccttcaggaacattttttaataaagcaggggccatgctgttaaatgtaaatatgtatggtttagttttacatacacagacttttcgaattaagctgtcactcttatgatgcataaagtttagagccttatactccagaaaaatgttaaagtttgttttgtaccacagctagacctcagacttcgtcctcaaagcttgaaaaaaaaaaaaaaaaaaaaagtatgctaattattttgggagtcttgacaaaggaaacgaaggtttaaatttttttttcaatcacaaattcttggatggctccacattttctgtaaagtaaactgtagtttgcaatctgcaggccaacccctttcctgtacatattcagcctctccagtaaattatatttgttacacgaatttccattacattagtctctactcaccttttttcaggacacatggaaatactccatttccattttcttggattctgcctctctcaccctgcccccccaacaaggaaaactcaaacaaaaatatatccatcatgtagattcccagtcagtatgttttcttctgtgaagactactttcttttggaattgagcacccttttttctacttttgtagtgctcattggattgtagtaatagttctcaaactttttgctctcagaaccctttatatgcttattgaggaccccagagagtttttatgtgggctacatcttccagtatttactatatgagaaatttaaacttaggcaatttaaaaatatttctttaaaaacaaacttatatgtttatatatatattttaaagaaaaaacacttttttccccaaataagaaatagtggtgggaggagtggggttgttttacattttgcaaacctctttcaatgtctggcttaatagaggacagctgaatggccgggcgcacgcctgtaatcccagcactttgggacacaaaggcaggcgaatcacctgaggtcaggagtttgagaccagcctggccaacatggtgaaaccttgtctctactaaaaatacagaaattagccgggtgtggtggtgcatgcctgtgatcctagttactcagaaggcttaggcagagagaattgcttgaacccgcgaggcggaggttgcagtgagctgggattgggccactgcactccagcctgggcaacagagtgagactccgtctcaaaaaaaaaaaagacagctgaattatcatatccacttctgcactcaatctcttgcgctatttggttgaagtatctaaagaaatagcagccccacatgcatatgtagtaggaaaaaggagaaatattttattagtcttttcagataattgtggatattctgcactaaaatggtagctattttcccccccagagaaaggtggaagaaaagtagtttcttaaagtttgctgaattggaatttgaaaccttagtaatgaatttcatacttaatacgttaagatccattggtctattttgtactttgaacgaatctcatccatgtgtgatttttgtgacatagtgcattagttatttggaaaataatggttcactcagttaagaacgtcctctgaatagcaacacatttcattatacaatatcaaagaaaatcatgtttgttaatatcactgatctcatcagaaaactctttaaatattgggaagctatctagttcactgttgtggatacacattatccaaaatgtatttttcaagcaacaattagaaatgtatcattgagaacaaatactgtcagtttttcttgaagcgaaaagctcactttgttcatgttgaagatgtacaccaaatgcccaagtcttattaacacagtttatcagtctctcaagtaaagatgatggtccatgaaaaatgtggctagttcattacatgactcagacaatcacaggtgcttttcctgtagtatgtaacaaaagcctgtttatgtagtctcctttttgtcatatagaatattaaaaagatatgcagcctgggcaacatggcaagaccctgttgctatacaaaataaaaaattagcttggcatggtagcatgtgcgtgtagtctctgctactccagaggctgagatggagggattgcttgagcctgggaggtggggttacagtgaaccatgatggagcctgtgcactcagcctgggcaacagaagaaaaaagtaggtattcatgggttgggatttaatacaattaatttttattgtgtcatcaaggatattctttttttaattttagtttttgttttttgagacggagtctcactgtattgcccaggctggagtgctgtggcacaatttcagctcactgcaacctcctcctctcaggttcaagcgattctcgtgcctcagccttctgagtagctgggactacaggcatgtgccatcatacccagctaatttttgtattttttttagcagagatggggtttcgccatgttggccaggctggtcttgaactcttgacctcaagtgatccatctgcctcggcctcccacaggcatgagccaccactcctggccaggaatattcttaagtgaaactagcttgctttttttggactgtaattaggtagctgtgaagaatgcagtgactaatggctcaatctggtgccactgccttgactcctgccaaggtaccagtagtttaccagccattgctttctaccatcagtacaaatgtcagcacagtgaaaagggcaaataaactcttagaattattatgaaaatagttttggccttgtagaatccctataaagattacacagaccactgggagatgctagtctgctatagtatctgcctgtcagctaaatcttgaggtctttggggccagagatactgccttactcatctttaattgttttaggattggccacataataccttgcccaaagtagctgctcaacaactagttgagtttagttgaatttctgttgagtgtaagtaaataaatggactttcttccattttttaattaaaatttctccttttaaaaaattgtgctaaaatacagataacataaagtttataccaggccaggcgtggtggctcacgcctgtaatcccagcaatttgggaggccaaggcgggcggatcacccaaggtcaggagtttgagatcagcctggccaacatggtgaaactcagtctctattaaaaatacaaaaaaattagccgcacgtggtggtgtgtacctgtaatcccagctactggggaggctgaggtgggagaattgcttgaacctgggaggcagaggttgcagtgagctgagatcacgccattgcactccagcctgggagaagacgcgagactctgtctcataaataaataaataaaatttataccattttagccatttttaggtatataatttagtggcgttaagtgtattcataatgttgtacaaccatcaccactatcagttttcaaaacttcatcagcccaaatagaaactctgtgtccattaaataatatctcattgtttccccctttcccatctctggtaacctccccattctactttgtactgctatgaatttgactattccagtactccatttaagtagaaaagtgttcttttgtgtctgacttattttacttagcatgtctttagagttcattcatattgtaccatgagtcagaatttctgctgaataatatcccatcatatagatgtatgcatgccacattgtgtttatccagttttctgttgatggacatttgggttgtttccactttttggctattgtgactagtactgctgtgaacattggtgtacaagcatttgtttgcatcccagtttttcaattcttttgggtatgaacctataagtggaattgctggatcatatggtaattctatgtttaacattttaaggacttgccaaactgtttacacagcagctgtaccattttacattcctaccagcaaggtatgaaggcttcaatttccccatattctaacgcttgttaacttttgtattaaaaaaaaaaatcctgatgaatgtggactgtcttacattttaaaattatagcttttctatgttactgagcccttcttgaattatttggtgttaagcttgacctctcttgtctttctaatgatgtgtacgcctcccaaatttacaaaggaaaattttttaaatggcttatttttgtcttgaggtagggagatttggtaaatacagtatggaatgaaagagtatataaatatattctttttttgtgtgtgtgacagggtcttgctctgttgtccaggctggagtgtaatggcatgatcaaaggtccctgcagccttgacttccttggctcaagggatcctcctgcctcagcctctgaagtagctgagactacaggcatgtgcctgcaaagtagctgagactacaggcatgcgcccagctaatttttttttttaattttttttttttatagagacagggtcttgccatgttgcccagggtggttccttaccctgggttcaagaagtcttcccagcttggcctcccaaaatgctgttattacaggcataagccaccacatccaggcctgaatatattctttattaaaaggtcattatttttcttttttctttattcatgatcataagttttaggttatgcctaatttatactcacatatatatgtttactgcccttttattatgcttgccttctaagaaataagtttttttgtttgttttgttttgttttatttttgagacggagttttgctcttgttgcccaggctggagtgcaatggtgcgatctcagctcactgcaacctccacctcccgggttcaagcgattctcctgcctcagcttcccgagtaactgggattacacgcatgtgccaccacactcagctaattttgtattttcagtagaaaagaagtgagactctgtctctggggtttctccatgttggtcaggctggtcttgaactcccgacctcaagtgatccacctgcctcaggctcccaaagtgttgggattacaggcgtgagccaccgcacctggcaaaaataagttttaaagtttgtataggcttttttaggtttacttattggaaataatgttttcattgtcccttcttttgatagtttaaagaagatggtgaatgaagtgcagcttttagctctgtgtcatagtcttatcaatagagtcaatagaaagatgacattctgcaaagggtgatctctggtgtgattacagggaattggccacagtatttgtaaaggaagatgaaatacaaaagtttcatttgttaacttggactgaagatttagagcattcattttaaaagagtatgaccaaggaaatcgtgaagaagttaatcttaacataaattgttggttctagatttggcattactttaatttaaaatggaaagaaaccaaagtggggagagagaattgaatttggagaaacctcttaaactatagaattttaaatgtgtatcttgttttatgttggttgttcgcattttttcatcataaaggatcttcaccttctcataaattatacgttctgaaagagttgtgtgccatattacttatcaagttcaaatttattttttctattttcattatcagtcattacttttgatccttattaggtagtctctccagaattgatatcacttagagaaatagaagcaatttaaattctcattagtttctacattatgcaggtaaaactagatttctttgcatctttatattatgaaatattcaaaaagatgtaaaatgattaaacaaacacccatccataactcagcttaaaaaataaaacattaccaggccgggcatggtggctcacgcctgtaatcccagcactttgggaggccgaggcaggcagatcatgaggtcaagaacctgatgaaacccagtttttactaaaaatacaaaaaattagctgggtgtggtggcatgcgctggtagtcccagctacagtgagctgagatcaacgacactgcactccagcctggcaacagagcgagattctgtctcaacaataaataaataaataaaataataaaacattaccagtatagttaagccccttctctctgtgtcatattacatctttttcactccccatgaggggcaactgcttctatattcagtgtttatcatcctcactattttttttataattttattaggtatatctttttttttttttgacacagagtctcgctctgtcgcccaggctggagtgcagtggcgctatcttggctcactgcaagctctgcctcctgggttcacaccattctcctgcctcagcctcccgagtggctgggactacaggcgcccgccaccacgcccggctaattttttgtatttttagtagagacggggtttcaccgtgttagccaggatggtctcgatctcctgacctcgtgatgtgccctcctcggcctcccaaagtgctgggattacaggcgtgagccaccgcgcccggcctttattatgtatatctttaaccaatatacagtacattttgtattttgtttgtttgtttgttttttaagacagagtcttgcttaatctcccgggctggagtgcaatggcgtgatctcggctcaccgcaacctccgcctcctggattcaagcgattctcctacctcagcctccccagtagctggaattacaggcgcgcactaccacgcccagctaattttttgtatttttagtagagatggggtttcaccatgttggccaggctggtctcgaactcctgacctcgtgatccacccgccttggcctcccaaagtgctaggattacaggtgtgagccaccgtgcccagcctgcatggtttttataacttatatatgacatcttactatatgtatgctattgtcatcccttatgtgttggtttcactttctgcagtttgttaactttgttcaatgttgaaatattaaatataaaattctagaaataaacaatttgtaagtttaacttgtgtgctgttgggagtagcatgatgaaatcttgtctcgtcccactgtgtcagccctggatgttaatcatttctttgcccagcatatctacgctgtatatgctacctacctgttagtcacttagtagcttgttagtcacttagtagccatcttgggtgtggttatcggatcaactcttatggtattgcagtgtttatgttcaagtgactcttattttacttaataatggacccaaagagcaagagtagtaatgctggcatattgttatacttgttttattttattaatgttgttaatttcttactgtgcctaatttataaattacattttatcatagatacgtatgtataggagccaagcacggtggctcacgcctgtaatcccagccctttgggaggcagaggtgggcggatcatgaggtcaggagatcaagaccatcctggccaacatggtgaaaccctgtctctactaaaatacaaaaaactagccgggcatggtggtgcgcacctgtagtcgcagctactcaggcggctgaggcaggggaattgcttgaacctgggaggtggagattgcagtgagccgagatcgtgccactgcactccaacctagcaatagagtgagactgtctcaaaaaaaaaaaaaaaaaagatatgtatgtacgtataggaaaaaacatagtgtatataggatttggtactatccaaagtttcaggcatcctttgggggttttggaacatatgcccctgcgataagggggtactactctattcttctgggtcttacttttttggttcagtattgtatgatttcttcatgttgacacacgtagctctagttcgttcattttcacttatggatagtataaatataccaatattgtgctcatccattgtatccttgaaggatatttagttttacaactatttataattaaaaacaatgatgtttggaatatttccgtacatgtctttggttgttcttcaaatatctgaggggttctctgagagcccaggtttggcaaagtaaagcctacaggccgcattgggctaccaccaatttttgtagataaaattttttttattggagcactgccaagatcatttgtttatacaatgtctgtaactgctttcacacttcaacagcagagttgaatagttgtgacagataccatatgttttgcaaagccaaaagtattttctggtctttcatagaaaaggtttgctgaccctgctctagtgtactaggggaacaattgctgggtcatgaggtatgatatcttggacctcactagatattgccaaattgctttccaaggtgtttatacctgtttattcccctgaagaagtgtaggagagtatcattctttcaccttcttgccaatacttgaagtggtctgcattttatggtggtgaaattatatcttattgtggttttaattctcatttccctgattcctcataagattgagtacattattatttttgagacggagtctcgctctgttgccctgttgcccaggctggagtgcagtgcctcgatctcagctcattgcaacctctgcctcccaggttcatgcgatcctcctgcctcagcctcccaaagtagctgggattacaagcatgcaccaccaccccagctaatttttctatttttagtagagttagggtttcaccatgttggctaggctagtcttgaactcctgacctcaagtgatctgcacgccttggcctcctaaagtgctgacattataggtgtaagccaccatgcctggccatgttttctttttatgaaataccttttaatttttttgcccatgttaacactgaattgttttcttgctgatttgtagaaattctttatgtattttgtggggtttttttgttttgttgggtttttttttgagacagggtcttgctctgtcacccaggctggagtgcagcggcacgatcttggctctgcctcctagtttcaagcaatcctcctgcctcagccacttgagtagctgggattacaggcatgtgctacaatgcctgactaatttttgtgttttttgtagaaatggggtttcaccatgtttgccaagctggtctcaaactcctggcctcaagtgatccacctgcctcggcctcccaaagcgctgggattgtaggtgtgagctgccacgcctggcccaaaattctttatgtattttggatactaattctttgttacagagttagcaggtatcttccagtttttagtttgtctcttcacttcgtgatgtttattaatgaacagaagatgttaaacttatgtaattttattaatcattttcttgatatctcatgtttttaaagatgctattgtgttctcttctaagaggtatacagctctgctttcacaattaagtcctcctatcatttttgtttttgtcctttacctatgtgctgtccaattgactggagtacacatgtagccactgactacatgtagtcagtggctacatgtgggtatttaaaaaaagaaaacagatttatagaggtataattgacatacaataaatggtacacatttaaagtatactctgataatttttgacatatgcgcatgtcaagccatcatcacattcaaagcaataaacatctatcacgcccaaaagtttccttgtgaccatttgcaattatcccacattctccaatctccatttctaggtaaccactgagccgctttctgtcttgtagattattttttctataattttatatacagtcatatgttgcttaacaacagggatatgttctgagaaatgtgtcttaggtgattttgtgttggtgtgcgaatatcagagtgtactgacacaaacctagatggtatagcctactgcacacctagattgtatatagcgtgttgctcctaggctacaaacctgtatgcaggtggtatggtatcattgttaacttcctgattttgatgggatcgtagttatgtaggagactgtccttgtgtgtaggaattaaatactataaatatttaaaattgatgggatttggtggtttacacactattgcttcaagaaaaagaaaatagaattattcttgcaaaaaaggaaaggtaaagctgaagatataaaaagatcagaaacccggatacttttaggaatctaggtagcagtttcatcagggtcttgctgctggatgtgtaccagataacagtctgttttttttttcaatgacgagaataaataagaaacagcagcatttggagtcaccatttggttatgataattcactgtcattttccaagagctatcagacttttgcagtggtcaaactatgtaataggaatagatgggatttaccaccccttcttctttcatgttttagtggtggcaggaatctttgttattctttgaaggatgcgacagtgcttttaaattattagtttggagtagagtctcattgttgaggtgctccaaagtcttgcacttggccttttctaccataataggcttcctaacctatcagttaagagctttcaggagaagctattagtttttgtccagctagttgatattccattcagtctgtggaattggggaattgtgtactatgtaatactaaatagtattactgcttaaataaaccctttaaataagggctaaagtgaaagcagtgtagccttttttttttcatttggactatttcttcagaaaaaaaattctcaaaactgaattatttgcttaaacaatgtataccttttgatggttgccaataagtattttcaaattgcttccctgaaggctttacatctccatactactttggaattggaattctgtaagaactcttaagtgattgagagtatgtgccctagagttgtactgcctaggttcgaattccagcttctccacttactgagagttgacagcgtgctggcagccctcgctggctctcagcgcctcctcagccttggcgcctactctggctgcgcttgaggagcccttcagcccgccactgcactgtgggagcccctccctgggctggccgaggccggagccggctccctcagcttgtggggaggtgtggagggagaggcgcgggtgggaactggggctgcgtgctgcacttgtgggccagcgcgagttccaggtgggcatgggctccgcaggccctgcactcggagcggccagctggcgctgctggccgcaggcagtgaggggcttagcacccgggccactagctgcagagggtgcgccgggtcccccagcagtgctggcccaccggcgctgcgctggatttctcgccgggccttagctgactccccatgaggcagggcttgggacctgcagcctgccatacctgaggccccccccccgccacccccccgcctcacacagcccaagcctccccgatgagcaccaccccctgctccacggtgcccggtcccgtcgactgcccaagggctgaggagtgcgggcccaagggctgaggagtgtgggcgcaaggcccgggactggcaggcagctccacctgcggccccggtgcgggatccactgcaaagccagctgggctcctgagtctagtggggacttggagaacctttatgtctagctaagggattgtaaatacaccaatcagcactccgtatctagctcgaggtttgtaaacacgccagtcagcaccctgtgtctagctcagggtttgtggatgcaacaatcagcactctgtatctagctaatctggtggggacttggagaatctttatgtctagccaaggtattgtaaatataccagtcagcactctgtgtctagctcaaggtttgtaaatgcaccaatcagtgctctgtgtctggctaatctagtggggacttggagaacttttgtgtctatctcagggattgtaaatgcaccaatcagcaccctgtcaaaacggaccaatcagttctctgtaaaacagactaatcagctctctgtaaaatggaccaatcagcaggatgtgggtggtgccagataagggaataaaagcaggctcagccaacattggcaacacggtggggtggcttccacaccgtggaagcttagttcttttgccctttgcaataaatcttgctgctgctcactgggtccacactgtctttatgagctgtaacactcactgcgaaggtctgcagcttcactcctgaagccagggagaccaccaacccaccagaaggaacgaacaactccagacgcgcagcattaaaagctgtaacactcaccgggaaagtctgcagcttcattcctgaagccagcgagaccacgaacccaccagaaggaagaaactccgaacacatccgaacatcagaaggaacaaattctggacacactgcctttaagaactgtaacactcgtggcaagggtctgcggtttcattcttgaagtcagtgagaccaagaacccaccaattctggacacattactacctttgtaaccttcagtaaaactatttgcaccagggtatccttacctataaaatagagatgttataacaatttattggtttttgcctttatgacatgcatattttcttgcttaagaaaattttccttaggctgggtgtggtggctcacacctctaatcccaacactttgggaggctgaggtgggcagattgctcgagcccaggaattcaagaccagcctgggcaacatagtggaaccccctctgtacaaaaaatacaaaaattagctgggcgtggtggcgtgcacctgtagccagcccaggcaaacccagctgcttgggaggcccaggtgggaggatcgcttgagccgaggaggcagaggttgtggtgagccaagatcatgccactgcattgcagcccgggtgacagagtgagactctgtctgaggaaaaaatgaaaagaatacttaagtgagagttagtatactagatggtgctgtcttttaatgcacttctcgttttatgtcattaaaaaaattaaaatataaagtaggaaataaatactatagttaaggaagacaacataaaaataccagttgcttaatatataaatttagtgcagtttcaatcagaatctcaagaaggttttttaattttgcaagttgctactaaagttcctttggaaaagtatgtgggagaattttctttttacttttttttttttttttttgggtagagatagggtcttactatgttgcacagactggtcttgaactcctgggctgaagctatcccctcctgccttggcctgccaaagtgctgggattacagatgtaagccaccgcgcctgcacctccctcccccttttttaagcgacaggatctctgtgttgtccaggctggagtatagtagctattcacgggttcaatcacagtgcactatagcttctaactcctgggctcaagcatcctcctgcctcagcctcacaagtagctgggactgcaggcatgagtgactgcacccagctatgtaagattaatttttttgtttttgttttttttggaggcagagtcttgctgtcacccaggctgaagtgcaatggcatgatctcggctcactgcagcttctgcctcccaagctcaagtgattcttgagcctcagcctcctgtaactggggttatgggtgtggtggcacacaactgtaatcccagctactctggaagctgaggcacaagaattgctttaacctgggtggcggaggttgcagtgagctgagattgagccactgtactgtagcctgggcgacagagcaaggctctgtctcaaaaaaaaaaaaaaaggaaaactaaaaagaaaagaaaaaggccaggttcagtggctcatgcctgtaatcccagcactttgggaggccgaggcggcagattactgaaggtcaagagttcgagaccagcctggcgaacatggtgaaatcccgtctctactaaaaatacaaaaatattagcctggtgtggtggcacatacctataatcccagctactcgggaggctgagacaggagaatctcttgaacccaggaggcagaggttgcagtgagccaagatcacgcctctgcactccggcctgggtgacagagtgagactgtctcaaaaaaagaaaaagaattgagggatacttaaactaccaattattaaaaagtactataaatagattagtaggatgagtttagaaatagatctaaggcaaaatgtagcatataataaaggtgacatttcagatgaatagggaaagtatgaattagtcatttttaggtcattgcaaaatatctctttgttcatgttaggcttttgaccaaaagtgtgatttaaataatattgcatctaaggatatttatttttagctcgttttttcacttgccattttgttttaggtgatttttgtgaatggctgaattatttgtatactgtaggtaaattttgttttgttttctttcttttactctttaggagactgagtcttgctctgtcgcccaggctggagtgcagtggcacgattatagctcactgcagccttgaactcctgagctcaagtgatcctcctgcctcctcctctgaagaagttagaactaacagatgcatgccactaaacctggttaattaaaaaaaaaaattttttttttttttttgtagagacagaatgtggctgtgttccccaagctggtctcctggcctcaagtggtcctcctgccttggcctcccaaagcactgtgaatgtaggcatgagccactgtaccctgccaaattttgtgttttgaatgtgctgtagaacttctgagagttcgcctcatttattcattcacatttattgtagtagaagttttttttttgtttgtttgttttttaatttacttcagtttgtttaaaaagaaagaggatagccaggcacagtagcacatgcttatagtcccagctgcttgggaggctgaggcaggaggattgcctgagcccaggaggtcaaggttgtagtatgtgatgatcacacctgtgaattagcctgcactccagcctgggcaacatattgagaccctgttgttaaaaaaaaaaaaaaatagaagaaagggttttatcaaaagctagtaaacaccccaaataattgaaagggctgaagaaacatacagtatactctaggctgagcttccatgaaataacttctgcaaccagattgcaaactggatgggctatgaagctgtccttgctgtgatttctgccggcaaaattgataccttttctctgctttttttttattttaaatattgcaaaataagcatatgtatagaaaaggtcataaaacataaatgtacacttcaatgaataattataaactgaacaccatccagttaggaaagaacattgtctgcactgcagatatctgtatgtcctttctgatttcatatttctatctccccctaaaaaactaccttcctgactttcatcatgagagttctgtaatggtttacttgtttttcttaatagtttcaccacttttctctaaacatgatggttgtttttgaagaaagtcatgctctatgtgttcttttatcatgtgctgcttgtgagattcttgtgtgctttatgtagtattgtccattttcatgttgaacaacttgggctgttgcccatttgtagcccttattattgttttagagacagggtcttgctgtatttcccaggctgtaaactcctgggctcaagcgatccccctgcctcacagcctcctgagcagctggtactacaggcacatactaccatggttgactcatgtatttgttgtgtatgtatgttaatttgtggtatatacctaggaggtagtcaaagagtatacatatctttacctttaataagtaatgcctaaatgttacctgcaatgtaccagtttacactttcacagtagttgatgatagtacatgttgctccattttcttgaccacagttcggttgctattgtcgaactttaatttgtgcggtcttgtagttatgcagcactatctcattgtggttttaaattagtatttctctgataattaaagaagctgaatacctttgcatattttgtggctgtttggatttcctattttgtaaaaggcttgtttaagctttttgtccattctcccatttgggtagtctgtctcattgatttgatttgtaggaaaattttatatattctggatgcttttcctttggcgcgtaggtgtgtgtattctgttctctgtgttgtttttattctaataatggtatcttctgaagaatagatttttttagttgcttttaaaaaagatgtgcaatgtgatagatgattttatgtatgtatacattgtgaaatgattaccacagtcaagttaattaacacatccatcacctcacatagttacctttttttggtggtgagaacactcaagatttattttcagcaaatttcaagtatacaaaacagtattattaactatactctctgtgttgtacattagatactaagaacttactcataatgggaagtttgtgctgtttgaccaacatctccccacttctcctaacccctaatccctggcaaccgtccttctactctttccttctgtgactttttctttagattccacgtataagtaagatcacacagtatttgttttttctgtgtttggcatatttcacttagcataatgtcctacaggttcatccttgtgttgcacatggcaggatttcctttttttttttttatggctgaacgatattccattgtgtatacatacattttctttatttatttatctcttgctggatacttagattgttttcatatcttggatgttttgaataattctgcagggagtgttgaggtacatgtatctctctgagagactgatttcattttctttggatatacattcagaggtgcaattcctgagtcatatggtacttctatttttagatatatttttaattctataatattttccataatagctatgccaatttacatttctatcagcagtgtacaaatgttctcccttcttcacatcctggccagcacttgtttactgttatctttttgataatagccatcctaataggtgtgaggttatctctctctttatttttttaatttttttttagatgggtcttctcgctctgttgctcaggctggagtgcagtggtgtgatcactgtagccccagactccttggctcaatggaaccttctgtctcagcctcctgagtagctaggactacagatgtgtgctaccatgcccggctaatttttaaatttttagtggagatgggtctcgttatgttgtctatgctggtgataaattcctggcctcaagcgatcttcctgtctcattttgtttttgatttgaatttccgtcatgatgcttgatgttgagcttctgttcatatacttgttgcccatttgtatgacttctttgacaaatgtctattcaggtcatttgcccagtttttttttgtttttgtttgttttgttttgttttgttttgttttgttttgagacagagtctcgccctgtcgcccaggctggagtgcagtggcatgatctcggcccactgtaaactccaccccctgggttcaaactattctcctgtctcagcctccccagtggctaggattacaggcgcctgccaccatgcctggctaatttctgtatttttcgtagagacggggtttcaccgtgttagccaggctggtattgaactcctgacctcctgatccacccacttcggcctcccagagtgctgggaatacaggcatgagccaccgcgcccggcctgcccagtttttaactgtgtttttgtttgtttgtttgttttgctattgagttgtatgatttccttatatattttggatattaatatcttaccacatagtgtaaagtttgtaaatattttctcctgaaagttgccttttcattttgttgatggtttcctttcccgtgcagaagccttttagtttgatgtagcccaactgtttttttctgcttttgttgctgttttttttgtttgtttgtttgtttttttgagacagagtctcgctgtactacacaggctggagtgcagtggcgtgatctcagctcgctgcaatctctgcctcctgaggttaggatccctcctgagctgggattacaggtgtgcgctaccatgcctggctaatttttgtatttttagtagagacaggctttcaccatgttggtcaggctggtctagaactcctgacctcatggtccacccactttggctttccaaagtgctgggattacaggcatgagccactgcacccagcctgttgccatttcttttggtggtcatattaaaaaagtaattgccaagaccaacgtcgagatttttccttatgttttttttctaggagttttgtgctttttgtttttcttttcttttctttctttctttttttttgaggcagattctcgctctgttgcccaggctggagtgcagcggcacgatcttggctcactgcaacctccacctccaaggttcaagcgatttgcctgcctcagctgcctgagtagctgggattacaggcgcacaccaccacatctggctaatttttatattttcagtagagatggggtttcatcatgttggccaggttggtctcgaactcctgacctcaggtaatccacccaccttggcctcccaaagtgctgggattacatgtgtgagccaccgcatccggcctgagttatgctttcaatgtatttcttacatttcagtttttaatcactttccagttaatttttgtgtatggtataagacaagggtacaatttcattcttttgcatgtggatatccaggttttccagtgccatttattgaagactatccctacctcagagttttgtttgtttgtttgtttgtttgttgttttgagacaggatctcactctgttggccaggctggagtgcagtggcaccatctccactcactgcagcctccacctcctgggttcaagtgattctcccacctcagcctcctgagtagctgggactacaggcacacatgcctggctattttttgtatttttttttttttttttttttgagacggagtctcgctctgtcgcccaggccagactgcggactgcagtggcgcaatctcggctcactgcaagctccgcctcccgggttcacgccattctcttgcctcagcctccagagtagctgggactacgggcacctgccaccacgcccagctaattttttgtatttttagtagaaacggggtttcaccatagtcaggatggtctcgatctcctgacctcgtgatccgcccactttggcctcctaaagtgctgagattataggcgtgagccaccactcccagcgtgttaagagttatctcaaaaaaaaaaaaaaattatcggccaggcgtggtggctcacgcctgtaatcccaacactttgggaggccaaggcgggcagatcacgaggtcaggagatcgagaccatcctggctaacacagtgaaaccccgtctctactaaaaaaatacaaaaaaattagttgggtgtggtggcaggcgcctgtagtcccagctatttgggaggctgaggcagaagaatggcgtgaacctgggaggcggagcttgcagtgagccgagatcatgccactgctctccagcctggacgacagagcgagactctgtctcaaaaaaaaaaaaaaggaacactcatttactgtctttattactgatttttctttttgcttatgttggattacaagtctgcatttttattttttttcttaacataattctattcctttaaacttccaggaattcttcatctttgcctatgacctttctgtgtgtgtctatatgttgtggatttatttctaacatttacattctgtcctttcagtgggattttggtggggagaatatgtcattgtttggactcattttgccatcatgaactataagttgcagtttgtttagtgttacataatacttcagaattgttgaatgacagtgaatttaattaaacagtatagggtttgtaatttaatatacagggattctgcccctaaatatttgagttatctgaagcaggtttcttaattattcaaagtattgatatccttatctgcaaaatgaggaataagtaaataaataaagggaataatcatatctgtctcataagttcgtcacaagcattatttgagataatacatgtaaagctcttagtatagaacttggtatacagtgaatatactcagtaaatgtaatttgttaagtagtgactattcaaaatagttatttcaaaaacaaatcaagccgagtgcggtggctcatgcccatgatcccagcactttgggaggccgaagcgggtggatcacccaaggtcaggagtttgagaccagcctgaccaacatggcgaaaccccatctctactaaaaatacaaaaattagctggggatggtggcaggcgcctgtaataccagctactcgagaggctgagtcaggagaatcacttgaacccaggaggcagaggttgcactccagcctgggtgacagagtaagactcaatctaaaaaacaacaaaacagaaaaacaagtagctttttcagaaagccttttagaagagatatgagtaaacagatgctaagtggctggctaaatgataccacaactcttgaatcaaaactgattcagattaaaaaaacctcttaacacattctttcctatcaatgtagttaggactaagagtcatgtagcagtagtaaacctgtcctgtaatatatttctcttaggattggtttgatagttgtatcataattgcattatttataacattaatttattaatgtattcattaattaacctaagtcctttagtagttttcagaatatttttcttaaattgtttcctgtgctaattcgaatgttaacatgctaattcagagtttgttgccatttgtatcctgacagtgtattaatgtttatacttgcaagagtgaaatattttatttcttattacagcggaatggccaaagactatgacgggtcttcctagcacatcagggacaactgccagtgtggtcatcattcggggcatgaagatgtatgtagctcacgtaggtgactcaggggtggttcttggaattcaggatgacccgaaggatgactttgtcagagctgtggaggtgacacaggaccataagccagaacttcccaaggaaagagaacgaatcgaaggacttggtgggaggtaacattctgtcgttttctctttcctcttttggttctatttagtccttttatgctttactaatgaaattgacctactactgtcccttttactgaagttactttcttagtattacaggttttttagtttgtctgatgtaatactcatgtatgtatgttcatatttttctcattactatgaattgacttttatttctgataatgactctaataggaaataatatttcagtgagccccaaggaaacaattcaaggttttactgaaaacctttcagatgactttcagaatctagacggagcagctcttggagttccagagtagaacactttgaatctggctgggggaaaaagattaagttagaattaaccttcagcttttttcattgatttcagatttactgcaaacctttccagttattgttttctttgtttgaacttagcgtttcaatgtgtaagtaatttgtaaactaggaactgaaattgatttcaattttatatttttatgattcaaacttaaatgaaagattattctaaaaatcaagagagtgaataacatgaaaaaatttaaaaattatctcaatactaatttttaaaaattgaggatatgaggcaagttgagtagaatccaatgttttctaaataatccttctaactaaagccttcccatgatatcgttacttgcctcttttttgcttttattaaatcaaaattggtcttttgcagagaaacgacaaactaaggaaaataattagcatctggctgggcactgtggctcacacctgtaatcccagcactttgggaggctgaggcgggcacatcacctgaggtcgggagttcgagaccagcctgaccaacatggagaaaccccgtcgctactaaaaatacaaaattagctgagtgtggtggcacatgcctgtaatcccagctactccggaggctgaggcaagagaatcacttgaacctgggaggcagaggttgtggtgagctgagattgcaccattgcactccagcctgggcaacaagagcaaaacaccatctcaaaaaagaaaaaagaattagcatccttaaactataaggagttcaacaaattaataaagtactaaagtgtgaggctgggcgcagtggctcacgtctgtaatcctagcactttgggagaccgaggcgggtggattgtctgagctcaggagttcgagaccagcttggggaacatggtgaaaccccatctctgctaaaatacaaaagaaattagccgggcgtggcagcgtgcaactgtagtcccaactattcgggaggctgaggcaggagaattgcttgaacccaggaggcagaggttgcagtgagctgagattgcgccactgcactccagcctgggcgacagagcgagactccatctcttaaaaaaataaaaataaaataaaataaagtactaaggtgcatggcaaccccggttaggtggataaaggagagaaagtttgaacaacaaaaaaatgcaaaacagtagtaaacatttggtgaaataaaagtaaaacattaagatgaaacttcatttcctgttattagattaggaaagataaagagattcctctcaatatttttattgaaatggttaccttcttggtaagattacaaattggtactacctatatagaaaataatatataccagtagctttaaatgtttagggaatctaaagaagaaatctgaactgtggacaaaaatatctgaatagagttactgattgcagcatttgtaatgactgttaaaggccagaagtaacttgaaggcctaacagctggataatggttaagtatatttagcaacatattcataatgctgaatatgatacagccattaaaaataacatttatagataagtttataaaactcatggtgttttgaaatttttccaagtaaaggtagagtaatatgaactcccatgtatatggggaaggtttaatgatagaggaaaatgtttatggtcacaaaaaagcaggatataaaattatatttctggtgttagcaatgcagagacatgggaataagatggaaatattctaaatttttataaatgagtgatgagattttatgccatacgtttatttttatttttttaatggcgacattcatttggttcaaattcaggtagcataaaaaagaggatatgctatggaaggtctctcagctgctactgtcccaaaggccacctcgttcccctccacttgctaagcaaccagtatggctgtgtgtcctttcaaaagagagatattcatatacaatcaaatatattatggagctgtaccatgtacagatgtaccgtcatttattttaatcagtctcctattgaaggatttttatttctaatttttttttgttattgcaaactgctgtgaaatgaaaaatctgcacatatgtgtttttgtgcacttgccagtatatttgtaggatcatttcctaaaagtggaattgcttggccaaagaggtgtatgttttgaatattgataactatttgtctctataaaggttgtaccaatttacacttctaccatcagtgtatgtggatgtcctggacaacaaataaaactttttgatcatatccagtttcaggtttaaaaaagaggtgtctcaatgatgtgtttttttggggttttttttgttttttttttttgaaacggagtctggctctttcgcccaggctggagtgcagtggcgcgatctcggctcactgcaagctcggcctcctgggttcatgccattctcctgcctgagcctctctagtagctgggactacaggcgcctgccaccacgcccggctaattttttgtatttttagtagagatggggtttcaccatgttagccaggatggtcttgatctcctgacctcatgatccacccacctcagcctcccaaagtgctgggattacaggcgtgagccactgcacccggcaatgatgttgttttaaaaaaaaattttaagaaatagaaatgaggtcttaccatgttgcccaggctggtcttgaactcctaggctcaagcgatcctcccaccttgtcctcccaaattgttgggattacagatgtgagccacgtgcccagcttcagtaatgttttaatttgaatttatcttatgagaaatattgaatctttttatatatttaagagccatttatattttcttttctctgtatttcttttaatatttattattcattttgggggattgttgttagccatttttttcccacattaatgtgtaggggctagctgtacattaaagaaattagtctgatgtatgtgatgtgaattttagatattgtttccacagtttgtcttttgattatgctcctggaactttttccacgtggaagtttcttttaatgtagttaaatttattagtctcttctgttacaactttttgggttttatgccacacacacagtgaagctttttaataaagtctgctatattttcttttagtacaacaggaatatttttggtcttagaaactctgtttgttcattgtatttgtttttgacatgatctcactctgttgcccaggctgcagtgcagtagcacaatcatggctcactgcaacctcaaatgatcttcccatgttagtctcttgagagctgggactacaggtgcacgtgtgccaacatgccagctaattttctttttctttcttttttttttttgagacagagtcttgccctgttacccaggctggagtgcagtggcgggatctgggctcactgcaacctctgcctcccaggttcaagcgattctcctgcctcagcctcctgagtagctgggattacaggtgcccgccaccatgcccagctaatttttgtatttttagtagaaacggggtttcaccgttttggtcaggctggtcttgaactcctgaccttgtgatccgcccacctctgcctcccaaagtgctgggattacaggtgtgagccaattcgcctgaccaggaaggagtattttgctcacttttccataaatgtttgtctttgatactgtttcaaaactcaagaaatgatagtttcttaaggtatctgaaactttattaatgaactttgcatattcttacattaacagccattagtcagtcaatgaagacattagttgaatagaaatttttttttttttttgagacttgagttttgctcttattgcccaggctggagtgcagtggcacgatctcgtctcaccgcaacctctgcttcctgggttctcagcctccggagtagctgggattagaggcatgtaccaccacacccagctaattttgtatttttagtagagacggggtttcacgaactcccgacctcaggcgatccacctgccttggcctcccaaagtgctggcatttcaggtgtgagccactgctcccggccctgaattgaatgctttttaaaaatccctgcataatttaaaaaaattaatgactttaattttaagagtacttttagattcacagcaaaattaagtgggaagcacagaattctcatatatactttggcctaccccccgtctcccaggcttccccactatccttctccagagtgtttgttataatcaatcagtgaacctacactgacatactgttatcacctggtgtccatagtttacattagggttcactccgggtgttatacattttatgggttttgacaaatacgtcatgacacgtatccatcattatagtatcatgcagattagtttcatcaccgtaagagtcctctgtactttgtctgttcatccctcccccacttactcctggcaaccactgctctttttactgccttcataattttgctttttccagaatgtcatatagttggaaccatatagtatgtagcccctatgcatgactttttaatatatgcatttattgtttgtaatatactaggtcactgagttatacagatcttgcaaatattgacactttttattatactatataatatccagtcatgcagcctctcaaaaaactccactgtatacatgtggtcttagtagtattatgaaaaaaaaaaatggaccttggagacaccctgaaaaagtctgtagtaacctgccaggggcccctaaaccacattttgagaaccactttgccagtactcgtatggtttcatcatcttttatattttaatctttaatccttctggaattttaagatctaagctatgtagtaaataggcaagttaactttttttctagatggctactagtagccacttgaataattatacatcttttcattactgagtagcagggtgaccaggcttaagacccttctttagtgggaagatgaccttgaatttaccctcttcttgtatttctctggtgaagataaatgtgaaatatcacctctgttgtaagacagcattgcttattgtagaatgatccctgaatggaattgcatcttggtagggaagttgttgaatggactgtacatttctattcggaagcacaggccttggcttccttgtatgcatgcagtttgtcttgtgtagggaccaagaaactgtagtcatgtgctatttattacattggtttctgtgacacatgaagcttacctaagctagaccctgtcgtcttgcttacaactgagccatcacttgggagatggaaaaatggcttctggctgtctgaatcactgctgaagacaatatccttgaagctgctatggtggcatactctatttcctgcccagtattctgcaaagttagatgaacctcctttcaggctatagtctatttgatcttgtgattgtgaaggtgagaatatatctgacatctctgctggttgtcatgctaagtgggctttgcaaattataaacagaattcttccatatatttgggtcttttctgggctataatttttttcctgcttatttaccagtattataatttttaaaacggagactttattataattttaaatattggtaggcctgattccttctcattaatcttccttttaaaaaatacttttcttggggccgggcacagtggcttacgcttataatcccagcactttgggagcctgaggcgggcggatcaccggaggtcaggagttcgagacaagccgggccaacatggcgaaaccctatctctactaaaaatacaaaaatattatccaggcgtagtggcatgttcccgtaatcccagctactcgggaggctgagggaggagaatctcttgaacctgggaggcagaggttgcagtgagccaagatcctgcctctgcactccagcctgcccaacaagagtgaaaactgtctcaaaaaaaataaaataaaataaagcagctggctgcggcacttgtaatcctagcgctttggaggccaagatgggaggatcacttgaggttagaagtttgagaccaacctgttcaacatagcgggacctccatctctaaaaaatttttttataattataaataaataaaataaatgaacaaaaaaggaaataattattttctacagaagaaattacccttttgtgttttaaaaatacctttcttgactattctttcttgtttgtttttttacttgaattttaaaattatattttatttgattttaataatgtttttagaaagagttttttggctttattaccaaaaacaccatctggacagttgggcagatactccgctattttggagcaggtaactttttgcaaaaattgagctattttattataagttatttccttgcttccctctgtcccggcctaggcaacgggccagcattttgtttttccagccttctgttgctgctcagtcagctctctgcgtgtcaggctgttcctttttacatgccttttaatcatataggacaacaacaggaagtgcagtaaaagcatcttttataacattgctttggttttttgttactagatgttgaaacttctatgttttaaccagtatcattatttgtctttttgtttctcagaaacacagatcataatatctttgaatattaagtgtcgagagagctgctcgtctagttatgttggaagcagctactgtaaattacttaggtactaagccttaccttgtaaggagaaggtttagcaaagaataatagagctttaagatggtattaaggcagaatgttggcatcttataactcttgtgtttcatggattcttgtgaatggcaagtttagtctttactctgctgttgacttttgagagtcatcattgaagaaagcttaatacaacaaaatgaatgcctttgatattttaactcttgttatgatcaacctatttatatcagaacttatttaaactagttcttggctgggcatggtggctcacgcctgtaatcccagcatgttgggaggcccggatgggaggatggcttgagcccaggagtttaagaccagcctggcaaacatagtgagatctgttctctacaaaaaaattacatgcctttggtcccagctatttgggaagctgaggtgggagcatcacttgagcctgggaagtcaaagctgtggtgagccacgatcacaccactgcactgcagcctgggcaacagaacgacaccctgtctcaaaaccaaatgaaaactagttctcaaaagggatggtaggctgggcatggtgactcatgcctgtaagactagcactttgggaggctgaggcaggcagattacttgaggccaggagttcgagaccagcctggctaatatggttaaaccccgtctctactaaaaataaaaaaattagccgggcattgtggcgggtgcctgtaatcctagctactcaggaggctgaggctgcagtgagttaagatcacaccactgcactccagcctaggtaacagagcgagactgtctccaaaaaaaaaagggtggggggatggtgaatgagcaactttctggaatttctcttctttgttaacacccacaatgttttctggtcattctctacttgtttcagtcttcctctggactgttcagtatactcaccactagccacaaatggctgtttaaattaataaaaattaaatttaaaaaatcaattcccatttgaagtaaagctcatttcggtcatgccaggcatagtttgagagaccatctctaatgttttgattatcagtgttttttcctaaagaactaatcatatttcaggccgggcgcggtggctcacgcctgtaatcccagcactttgggaggccgaggtgggtggatcacgaggtcaggagatcgagaccatcctggctaacctggtgaaaccccgtgtctactaaaaatacaaaaaattagccaggcatggtggcaggtgcctgtagtcccagctactcatagtcccagctactcgggaggctgaggcaggagaatggcatgaacccgggaggcggagcttgcagtgagctgagatcgcaccactgcactccagcctgggtgacagagccagactctgtctcaaaaacaaaaaaaaaaacctaatcatatttccaagttttaggcatttcttttgctcctatgacacattttaggagggttttcttactcttgtaactcccaaatctatatgtctacagctgatctatttcacaaagtctagtctcaaactttgaattacagaaatacctaaatatatagtattttctgtatattgctgaaatcatattaaaactgccaacaattagctgggcatggtggcacatgcctgtattctcagctactcaggagactgaggtgggaggatcactgcagcccaggaggaagtcaagcctgcagtgaaccatgagtgcaccactgcactccagcctgggcgacagagaccctgtatcagaaaacaaaaaacaggctgggcgctgtggctcacacctgtaatcccagcactttgggagactgaagtgggaggatggcttaagcccaggaccagcccaggcaacatagtgagaccccgtctcctcaaaaaagaaaaaattaggcaggcgtggtggcccacgtggtggctcccagcactttgggaggctgaggtcaagagttcgagaccagcctggccaacatggtgaaaccctgtctctactaaaaatacaaaaattagcaggcgtggtagcgtgtgcctgtagttccagctacttgggaggctgaggcagaataatcgcttgaacccaggaggcggaagttgcagtgagtcgagatggtgccactgcactccagtctggacaacaagagcaaaactccatctcaaaataaataaataaaaataaacaaaaaaactggctgggcacggtggctgacgtcagcctgtaatcccatcactttgggaggccgaggtgggcagatcacttgaggttgggagttcaagaccagcctggccaacatgctgaaaccccatctctgctaaaaatacaaaaatagccaggcatggtagcatacgcctgtaatccaagctactcgggaggcttaggcaggagaatcgcttgaacccaggaggtggaggttgtggtgagctgagatcacaccattgtgctccagcttgggcaacagagtgagactccatctcaaaaacaacaacaacaacaaaaattaaaactgaagttctgctgtttcgcccgtcctcaacataaacactcagaaccctataacctttcctttttaattgcttatatcacaatttaatgcctatttatttatttatttattgagacaagagtctcgctctgtcatccaggctggagtacagtggtgtgattctcggctcactgcagcctctgcctcccgagttcaagcagttctctctccacttagataaggccttctgtcaacccccaattgtttactaattaggtagtgttgctttttttttgacatggtatttatacttacttttcttcacattacattcatttggttatactgcctattccagtaatctcaaaattttccactttgaatctaccctaattcctctctgaacaggaattttggcttatgcatctttgtatttgaaacacataagacattattttgtaataatgtagtcttattttattagtgatttaatatactgagctatcttagttgttgtattttaatcatttagattatttatgtgaactctttatttttagtgtaatgaacaagtctggggtgaatcgtgtagtttggaaacgacctcgactcactcacaatggacctgttagaaggagcacagttattgaccagattccttttctggcagtagcaagagcacttggtaagtaggacttaatttggtgaaattatattgaattttctacaatatatggtggcaaaataaaagaggagacagaactaaacccttacttggcatatagtgagggtagagatatcatgatattctattaactgctttagaacctaatcgaagccatgcatggtggctcacgcttataatcccagcactttgggaggctgaggtgggcggatctcttgaggtcaggagtttgagaccagcctagccaacatggtgaaactgcatcttcactaaaaaatacaaaaattagctgggcatagtgatgtgtagctgtagtcctagctactcaagaggctgagtcaggagaattgcttgaaagcaggaggcagaggttgcagtgatcgcatcactgcactccagcctgggcgacagagcaagactctaaaaaaaagcctaattgaggggaaggtttaggtatataattcactgacagttgccctttgttcatgagtcacgttcaatgttttgctaatttctatctctgtttagggaagtatatgcatatctaggcttaatgttacccttgaaactatttttaagtatcccattctcctttagcccttaatagtcctcctgagagccttcaaaacctcttttttctttagttaggaaagtaaaataactatgaaaaaaatagttatatttctggtctacctggctttggaaagaaggctagagaattacacctgttaaggtgtcttaccttggctatgctagatgggggtagttttttcaaagaaaatgtctctgagaaaacgcacatttgtttatttttattttatgagacagggtcttgttttgttattcagcctggattgcagtggcatgatgacagctcactgcaacctctacctcccaggctcaagtgatcctcccacgttagcctcccgagtaactgggactacaggtgtgagccaccacgcctggctaattttttcttttttaaggagacggggtctcactgtgttgcccggggtggtcctgggcttaagccatcctcctatctcggtctcccaaagcactgggattacaggcatgagccaccacacccagcacaactactatatatattaataatttgtttccaatgtgaaactaattttcttctttcacaccctgactggtggacttttatgttatatccaagcatttgctattatgaaaaatactgcaataaatatttccttatatacacatatgggttgttttttttttttaaatggagttttactcttgttccccaggctggagtgcagtggtgcagtctcggctcactgtaacctctgcctcctgggttcaagcgattcttctgcctcagcctcccgagtagctgggattacaggcatgcaccaccactaccggctaattttgtatttttagtagagacggggtttctctatgttggtcagactggtcttgaactcctgacctcaggtgatctgcccgccttggcctcccaaagtgctgggattacaggcgtgagccactgtgcctggcaagatttctttaagatacataactagaaatggaatttctgggtcatagtatgttacttaccaactgtttttgtgtcgtaacactcacacaagatgataatatttctacagtaagcagaggaggctacttgagactgaggtaactaacatggactctctagccactgaggacccaccctgctgcccctaggcctcactcatccaaggaataccaattgggagactcagttcagagatatctacatgtttagttttattaggtattgctaaatttcttcccaaagtgattatcccaggttattacagtcccgctgtattagttatctattgctgtgtaatcaaatactcccacacttaggagtttaaaacattttttatgtacacagttcctccggctcaggaacccggggtgacttaactggatggttctggctcagggtctcttgtgtagctgcaatcaagatgtcattaatcatcgaagccttcaatggggttggagcatctacttgtaagacagctcactgagtaacctggattggctggaggcttcagtttcttgctttgccggcctctgcatagggttgcttgatgtgtcttcatcacatggcagctggcttccttagagcaagtgatcataaaaagacattttgacttctaccttgctttcttgatcacttgctgtagggaacccagctttgtattttgttagccctgaatcactaaatcaagcccaccctcaagtatatcaaataatttgtggatgtattttaaaagcatatagttcctacttcttcatgattgttctttattcaccaaatatttattaaatacctgctatgtgctaggtactgttccaggtgctgaggattcagcagtgaatgaaacaaaaattcctgcacccatggagcttactttctaggttaggggaaaacatgataaactaaaataactaagtaggacacatactgtgttagaaatgctaccaagaaaaataaagcagggaatgctatgagggtggggcctgtataataattctaaatgggatggtcagaggagggtctcgctaagatgatatgtcagtaaagtgtaagtaaagagatgaggcagtgagacctgtgagtgtctggggccacagaatttaggcagaagtaacaaatgtaagggttctcattactcatgaatttttctcttttttttttgagatgaggtctcactctgtgccctaggctagagctcattgcagcccctaaagtcctgggctcaagtgttcccccagcctcagcttcccaagtagctggggctacaggtgcatgccatcacacccaactaatttttaaaaattttttgtagagacgtctcgctttgcccaggttggtctcaaattcctggcttcaagcgatctgcccacctcagcctcccaaagtgcatgtgcgacagcgctcagcctactcatgatttttttttttttttttttagacagaatttcgcttttattgcccaggttggcgtgcagtgatgtgatctcagctcactgcaaccttcacctcctgggttcaagcaattctgctgcctcagcctcccaagtagctgggattataggcgtgcgcccccacgcccggctaattttgtatttttagtaaagacctgtgagtgtctggggccacagaatgtaggcagaagtaacaaatgtaagggttctcattactcatgaatttttctcttttttctttttctttctttctttttttgtttttttgagatgaggtctcactctgtgccacaggggtttcaccatgttggtcaggctggtctccaactcctgacctcaagtgatctacccacttcggcctctcagagtactgggattacaggcatgagccactgtgccccgctcctactcagtatttttaactgagcagctggaaaaatggagttgccactaagtgataaagaaatgactggaacatcagtgtaaaggagaggtcggaagttcagttttggacacattaccctttcggcatgttttagacattaaggtggtgatacctatttggcttcccattataagaattgatttcaggtgttgtctagggtggagctttcaatttgggggagccagtagcatatagatagtatacaaagtcttgaggtcatgtagggattgagtgcagatagaaaaggggacaaggtctagtggctgagccctgagatactctcactgttaagactcgggggatgtgctctggtttcatttgagggttggattaaaattaaaaaaaaatctaaaagagttaggggatgtgaatggaagaacaaggtaaaacaactaacagctgtaagtcaaataggaaatttgggttagcgtaccctggaagctaagtgaagaaagtgtttccagaaagaaagtgtttcaaatactgttgtcatttaggtggagggaggattgaaaaatgaccatgggatttaggaatgtggaggtcattggtgaccttgaaaaagaaggtagcttttggtggaatagcaagaccacaaccatgattggggttattgaagaaagaactgtcttcttgagtgggaggaataaaatttgatacagcgagtttttagacagtgtttttatagaagttactttacttcaacataattttgtaaacacatacagaaatgaattaatattttgataaaagggcttataagagaaaatcgttttagtgataaaaaagcttttttcctcttgatttctcttgtcacataaatattttcttttcaaaaataatgctaccttttagattttaatatttaagctaaaaaggctttgctgtattacttttcaaaccattattctgacacttggaaaaatttttttttttttatgagatggaatctcactctgttgcccaggctggaatgcagtggcacgatctcagctcactgcaacttccgcctccccggctcaaatgattcttctgcctcagtcttccaagtagctgggattacaggtgcgtgccaccacacctggctgatttttgtatttttagtagagatgggatctcaccatgttggccaggctggtctcgaactcctgacctcagttgatccgcccacctctgcttcccaaagtgctgggattacaagcgcaagccaccgcgaccgaccggcctggaaataatatttttaaaagagccatgttattggttttctgagtttagcttgttgcatggaaatacttactggcctaaagtaaattaaatgctcatatttagcacacacccttatggtttacggccatttttcttataggtttttttgggcgggggaaggggtgggaatagatgtctccttgtcaacattggtacccaccctatagacactgatgataattacccaagtacaaatgtagcaaaggtgccctctagtggctgcctgctggaattgcattttgagtcttgcaaatcattttattcactggggagataatttttgagtatagtgtgtatgaagcactctgctgtatgtacaagcacatgatctttgccctcatggagcttgcagtctaggaaagggttgaaaggcattcatcagatgataacaaaaaactgaaaaaaaaattatttttttttgagactgagtttttttcttgtcatccaggctggagtgcattggcacaatctcggctcactgtaacctttacttcccaggttcaagcgattctcctgcctcagcttcccaagtagctgggattacaggcacccgccaccatgctcggctaagttttgtacaaaaatacaggggttttgccatgttagccaacttggtctctaactcctaacctcaggtgatctacccgcctcagccacctaaagtgctgggattacagatgagagccacagcgcctggctaaaactgaacatttttaattcttcttcttcttctttttttttttgagatggagtctcactctgtcgcccaggctggagtgcagtggcacgatctcggctcattgcagcctccgccttccgggttcaagcgattcttctgcctccatctcccaagtagctaggactacaggcgcacgccactgcacccagctactttttgtatttttagtacagacggggtttcaccatgttggccaggctggtctcgaactcctgacctcaggtgatccgcctgcctcgggttcccaaagtgttgggattacaggcgtgagccaccacacccagccaattcttaacttcttatatgtactaatgaaaacctaaaataaggatatttcacttaaccagagaggccagaaaagtgatatttgaactgagttttgaagaattactggaggttaaggaggaagaaagtgtgttttaggcatagaaaacaacattttcgaaaagttcggtgataggaagaagcatagtgatataggaactctgatgaagggcagtgtagctggaacggataaggaaataagagacttggataaaatgagaaaatactgcattttataggcagtggtaaataatcatgtttggctggatgtggtggctcacacccataattctaacactttgggaggccaaggcaggtggattgcttgagttcaaggagttcaagaccagctggacaacatggcgaaatctcccctctacaaagaattggctgggcgtggttgcacgcgcttgtagtctcagttactcaggaggctttggttgggaggattgcttgagcccaggaggctgcagtgagccaagattatgtcactgtactccagcttgggcaacagagcaagaccctgtttcagaaaaaacaaaagaattgtgtctttatcttaaaaacaattgtgaactataacagagttggaatgggaaacataaccagatttgtgtgtttttaattgtggtaatatatgcttagcatacacgtaacttaccgttgtaaagcatgtggttcattgatgttacgtacggttacactgttttgcaactgtcatccaccattcatcctagatttgtgggcttttgtttgtttgtttttgtaatttcagcttttagattcaggaagtacatgtacaggtttgttacatgggtatattgcatggtgctgaggtttggggtacgattgattccgtcatccaggtagggagcatagtacccaattgttagtttttcatgtcttcctccttctctcccttctccctctagtggtccccagtgtctattgttgccatctgtatcttcatgtgtactcaatgtttagctcccatttgcaagtgagaacatgtggtatttggctttcttttcctaaaagaaattggaaatttcttttatttagaaatttagaaatttcttttcctaagtaaattggattaatttacttaggataatggcctccagctgcatctgtgttgctgcaaaggacataatttcatttttttttttgtggctgtgtagtattctgtagtgtgtatgtaccatattttctttatgcatttcacttttgatgggcacctaagtagattccttgtctttgctattgtgaatagtgctgcaatgaacatttgagtgcatgtgtctttttgtagagcgatttattttcctttggatgtatacccactaacaggattgctagatcgaatggtagttctaagttctttgagatatctccacactgctttccacagtggctgaattaatttatattcccaccaacagtgtataagcattcccttttctctgcagctttgccagcattgtcatttattggctttttaataatagtcattctcacagggtatgagatggtatttcattgtggttttgatttgcgttctctaatgattactaatgtggagctttttatgattcttggccgtttgcatgtcttcttttgaaaagtgttgatgccttttgcccactttctaatggggttatttgtttttaacttgttgaattgtttaagttctttacagattctagatattagatctttgtcagatacatagtttgtgaatattttctccctttctgtaggttgtctgtttactctgttgatagcttcttttgctgtgcagaagctctttaattaggtcctacttgtcaatttttgtttttgttacagttgcttttgaggatttagtcacagattctttcccaaggctgatgtccatccacgattcttacagtttgaggtcttacatttaaatctttaatccattagtttgtgttttaaagagagaattttcattgagttttgagaatggattagagggggtaaacattgttggaagttctccatgggaagccactcaaaggggtgctgaaatttgataggtgtaaggaccactgagtgtcttgtggactgctggctgccaagtgccacaggagcaagcagaaaatatactggaaccagaaagcaggcctcctctcttctggtgtcccttcagcaccctctactgaggaaaaaagggaattggctgtctgccagtttccaaggcacctcctttcaggacctacagaaatgatgttctatgatcgtactttggtgtacaaacactagaccagtaataaaaacccttagttaaaggcccaattctgatccttaccagttatttgatattagatagaatcatatagactctttgaactggtaaaacaagggaaagtgtctatgagtatgaatcatctggtgagtttgttgaaaggtcagattctagggacttttactagcaaatttgaagcaacttgagcatcaaaacaaattataacaggaataagttaaaaaatattgaataaaaaagaatctgtaagtctatatagagataaaaaattgtacaggtagaagaatggatttttttttttttttttttttttacatttaaaggagtttaattgggcaatgaacgatttgtgaattgggtagccacccccgcccacagcagattcagagagactccaaagaaaatctttttttttgagatggtgtcttgctctgtcaccaggctggagtgcagtggcgcgatctcggctcactgcaacctctggctcctgggttcaagtgattctcctgcccgagcctctcgagtagctgggactacaggcgtgtgccaccatgcccagctaatttttgtatttctagtagagactgggtttcaccattttggccaggatggtctaaatctcttgacctcgtgatccaccagcctgggcctcccaaagttttgggattacaggcgtgagccactgcctccggccaggaaactcttctttaaaaaagattttcagccgggcacggtggcttatgcctgtaatcccagcactttggaaggccgaggtgggcggatcacgaggtcaggagatccagaccatcctggctaacacagtgaaacccccatctctactaaaaatacaaaaacttagccaggcatggtggcgggcgccttatagtcccacctactcgggaggctgaggcaggagaatggcgtgaacccaggaggcgagatcacgccactgcactccagcctgggcaacagagcgagactccgtctcaaaagaaaaaaaaaaaaaaaaagactttcaggcctgagcacagtgacttatgtctctaatcccagcagcctgtaatcctagcactttgggaggccgaggtgggtggatcgcttgagctcaggagttcgagatcagcctggccaatatggcgaaaccccatctgtagaaaaaaatacaaaaaaattagcctagcatggtggcacacacctgtagtcccagctacttggaaggcaggtgagagaactgcttgagcctgggaggcgcaggttgcagtgagccatgatcgcaccaatgcactccatcctgggcaatagagtaagacccagtctcaaaaaaaagaaacctttttggggttgggaaagaagagcaaaaagaaccaaaataaagtaaaataaactgtcagctaataaatgtagttagaatgtcctaattctgtcatcagtttataaccgttataataattgattcattcaggaatcatcagtagatgctaaaatatggcatattttggtacagaacaggatatttcacagagcctcaaactttcaccctacagactactcaccagttaaaaaaagaaaaaggcacctttatgctgccagtagatagcactttaaccaaatgatgaaagtcaatactgccaataataggactgactgacacactgtctctcctcatgtgatatacggagaaggacatgacatcagcaatgtagtcctgtagccaaaagtgagtttacccgttcatgaacccctgtagagcacgagaacaagaggaaacaatcagatggatccaatttaaaggtcattgtgcaatagaactcttttcttttctttttttttttttttttttttgagatggagtctcactctcgcccaggctggagtgcagtggcatgatcctggctcactgctatgtccgctttctggggtcaagcaattcttctgcctcagcctcccgagtagctgggattacaggcgcgtgccacccagctaattttgtatttttagtagagccggggtttcaccgtgttagccaggctggtctccaactgttgacctcaagtgatccacctgcctcggcctcccaaagtgctgggattacaggtgtgagccaccgtgcctggcaaaagaactatcttgaactcttcacagttgtcaataccatgaatgataaaaacaaaacaaaaccctagggaattgttttaggttaaaaatgactaaaaaatgacaaatgcaattaactttttaaaaagtttttttaaaaataaagatggggtttcactgtgttgccccggctggtctcgaactcccaggctcaagcaatcctcctgtctccacctcccaaagtgctgggattacaggcatgagccacctaacctgactgaagaatgatccttgaatggatcctggatattaaaaatgcattattgtgacaactgggaagatttgaacataaactttatattatacagtgctatagcaatatgaaattgcctgagtgtggtagaataacatcctcatgcttaggagataaatgttgaagtattactgtttggaggtgaagtgttttgagtctgtaatctaatctcagatggttcagcaaataactaaaaccagctctatccacagattccaacactatctgcataaaaaatcccagataatcttcaaaagaactactggaattaataagtggagtcagcaagttcacaggacctagatttagcatacacagtctatcatatttttatgtactaaaaatgaacaattcgtaataaaatttaaataagtatcatttataatcgcacccaagaaaaccatgaaatacttaggtataattgtaacaaactgtgtttaagatttatatgcgtgaaactacaaaatgatgaaagaaatcaaagaaatagaaatataccacatatcttagtcaaaacccagagtttaaaaatttaagttagaagaaacaatcccttcttctgaaaatgtattgaggtttattgagaaagaaatagagattgaggctgggcgtggtgtctaacgcctgtaatcctagcactttgggaagcctaggtgtacagatcacctgaggtcaggagttccagaccagcctagccaacatgatgaaacctcgtctctactaaaaatacaaaaattagccagatgtggtggcgggcacctgtaatcccagctactcgggaggctgaggcaggagaatcacttgaacccaggaggcagaggttgcagtgagccaagatcgtgccattgcactccagcctgggcaacaagagcgaaactccatctcaaaaaaaagaaaaagatattggagactagtgatttggaagttgtcagtaaaagagttggaaacttgaaaggatggtttcaccaaagcaatgtaaaatatatatgtgtgtgtgtgtgtgtgtgtgtgtgtgtgtgtgtgtatgtgtatatatatatgtgtatatatatgtatatatatatgtgtatatatatgtatatatatgtgtgtgtatatatatgtatatatatatgtgtgtatatatatgtatatatatgtgtgtatatatatatgtatatgtatatgtgtgtgtgtgtatatatatatatacacacacacacatatacatatacatatgtaggtaggtagataggtatctccagaaagataagaacataagaataatagtccttacagggaaaactggaagggcagtggtgagaagggagaattttcactgtatatgtacccttttatatcttttggttttcatactatgcgaatatattacataatattataaaaaggcagacccagtaccgtggctcatacttgtaatcccagcactttggggaaccgaggtgggaggattgcttgaatccaggacttggagaccagcctggacaacatagtgggaccgccatctctacaaaaaataaattagctgggcctgttggtatacacctatagtcccatctacttgagaggttgacgtaggaggatcacttgagcccaggagatctatcctgcagtgagccatgattgtgccactgtccccatgttcatttttattatttcgtcaaccagggagctttgttttgctggtataaagaggtaagtgtgtctttgtgagcttatctggattataattagcttttagtgcttgcatgtattctgttttgctgctcagagggctgaattgctttttgaagagtctggttagcaatgattttgctactttcaagtgggagtaattgacttgaattattctttctttggactctgagcatgtttgaattgccagtatttctgatggggagctagtggggaagtttaaataaagaaaaggacaaagcttcctcttgtttaacaaaaaaaccagacctactgaaaggggacaaaaattgtttaacctcttgtctgaaaatcttttgcttttaatttaggcctttcccttaaatagttcacaataaacaaaagaggcagaaattaatgttttctcctttctgtctcctcttccacatttattggaaacagaagaaaaatttatattgtttcatttatgttgtcttatatattacagaaaagtagatggtttctataaatcatttttattttcttctgttttagttttattgatcttttttatggcctgggtcgactaaaagttattgtctcttgaacattttgatgtttgtatctaataggtctaaaggcagaagtttaggcattgtttttatgtggagctaatcaaggagaaggataaatgtaagagctttctttttccggctcagtgaaagggagaactgttgctctccaaagtttggtcatatggttggtaaagagcattacaatgctcatttttatattttgaattttcttgcaagtgactggtacttgttctgtaagttttgatgtaggtactttactgatctagagattaacaggaagtttgcaaacagccattggtacttctgtttgtaggataagttctcatcttgtcctttttcttcaaaattatcttgattaatcttggccctttgcgcttagcctgtcaaattctacaacaatccttttgggattttggttagaattacattgactttgtagattattttgggaataattgacatctttattatagtaagtattgctatctatgaatctgattggttacttcatttatttagattatctttttaatgtttcaaaatagaatctataatcttcataacaggcatgtataccgtttgttaaagttgttcctaagttccttacatttggttcattgttaaaattggattatttaaacatttatattttctatgtcttgctatcatatagaaatacgttgacttatatattgggtttgtatttaacaactttgctaaacttttctattgtaataatttatttttggttttccatgtataaatgaaattatctgcaaataatattagtattattttctcctttccattttgtatatactttatttttattatcttactgtgctgggaaggactcagtatagtattagaagagaagcaatgatacaaggcatagttttcttatttctacattttaaagggaatacttttaacattttacctttaagatgattattacagaattctggtggatatactttatcaggttaagggagttcccttttattcttagtttgctaggaaatcttatcatgagaggagtttgaatgttatcaaatgcttttctgcgtctattgagatgaactgtgtagattttctcttttaatctgttgctgttgtactattagcttccaactaatacttcttgctttttctgctcccttcccccaggtgatttgtggagctatgatttcttcagtggtgaatttgtggtgtcacctgaaccagacacaagtgtccacactcttgaccctcagaagcacaagtatattatattggggagtgatggactttggaatatgattccaccacaagatgccatctcaatgtgccaggaccaagaggagaaaaaatacctgatggtgagatgtgattgaataacttgatattgttgtctaaacattgttttggtacttctgtcagaatcttgaatatgaactaaggacattgaccttgggtagatttttgcatttgccttgatctgctagtgggtaaaacataggctttgtagctcctaatcattagaggaatgagacaagaaatatataaccgaagtctaataacaaaacacacaaccactgacttcagtataaattggcctgtgaaacgttgctaattccttatttttttaaatgacatataatttccataccataaaatttatcgttttttttttttttttgagacggagtcttgctctgtcacccaggctggagtgcagtggcacaatctcggctcactgcaagctccgcctcctgagttcacgccgttctcctgcctcagcctcctgagtagctgggactacaggcgcctgccatcacacgcggctaatttttgtatttttagtagaggtggggtttcaccttgttagccaggatggtctcgatctgacctcgtgatccgcctgccttggcctcccaaagtgctgggattacaggcgtgagccactgcgcccggccaaaatttatccttttaaagtgtataattcagtgattcttagtgtagttcacaaagttgtacaaccatcaccactactactttttttttttttttttctgactgtctcagtgtctcgctctgttaccgaggctggagtgcagtggcatgatctcagctcactctaacctctgcctcctggattcaagcgattctcccacctcagcctcccgagtagctgggattacaggtgtgtgccaccccacccagctaattttttgtatttttagtagagatggggtttcatcatgttggccaggcagggctcgaactcctgacctgaggtgatgcctcagccccacaaagtgctgggatttaaggcatgagccaccgcacccggcctccatcaccactacttctactactttttttgtttttttttccccccaagagatgaggtgtcactatgttgcccaggctggtttagaactcctaggcttaagcagtcctctcacctcagcctcctgagcagctgggactactgtggtgccatgcccagctcctaatctcaaaacattttcatcatcatcccctaacagagcacatggaagtatctggaatcaaaaatccaaagatgggttatccttagaaaagatgatctttctctcagatggcaggaatagtaaagctgtattttgaggtggaaggaggggcaaattgattgaatttttgttaaattgcctccattcattccgggcgcagtagctcacgcctgtaattccagcactttgggaggctgaggcgggtggatcacccaaggtcaggagttaagagaccagcctggccaacatgatgaaaccccacctctactaaaaatacaaaattagctgggtgtggtggcactcgcctatagtcccagctacttaggaggctgaggcaggagaatctcttgaacccaggaggcagaggtcgcagtgagccaagatcatgccattgcactccagcctgggcaataagaacgaaactctgtctcaaaaaaaaaaattgcctccattcattcactcaattaacatactaggtactaggtacagggattgcaaaggtaaatagaatatggtccttcctcagcacttaccatattattataaatagaatatataaaaaactaacaatcccattagatcatgagttcttttaaggtgagagtcatcttgattcagttttacatgttcagggcctggtgtgttgcatttagttggagattatcatgtatcaaagagtaacataaagactcttctgtctaatggatttagaattctttaatgatctgagagagatcatttcaatggcataaagacaaaaaccagtttgtagtgcattggaagaacctatttatgaaccataaagtgttttaagatgagtattgaaggaagcatccgtataatgtataattagaacaagtcttatgagacctggaagagtgagacgatagaaaacttcacaagactgcataggaagcttcatggaagagagtgatatttgagcaagaaaatttgcaggcttaatctaaggcagcagtggtttttggaaaaaacacaaagaaatacatgtaggccgggcgcagtggctcaagcctgtaatcccagcactttgggaggccaaggcaggtggatcacttgaggtcaggagttcgagaccggcctggccaacatggtgaaaccccatctctactaaaaatacaaaaatcagccagacgtggtgactcgcacctgtaatcccagttactcaggaggctgatgcaggagaattgcttgaacccaggaggcagaggttgcagtgagctgagatcgtgccactgcactccagcctggtgacagagcgagactccatctcaaaacaacaacaacaacaacaacaacaaaaaacacaaatacataagtagtagaattgacagctcttatgtttataaggaggaagaatatgatgacacctaaatttctaactctggtgactagtaagctgttataaagaagagacattatttagggagagatgggggaggtaattagttcagacataggcatgttgagttgaggtacctgtggttcatctagatagatatcttcagtaggcagttataaatatttgagagagaggggtggcatgctcctatagtcccagctactcaggaggctgtgggaggattgcttaaccccaggagttcaaggctgtagggctctatgattgtacttgttaatagccactgcactccagcctggacaacatagtgagaccctcatctctttaaaaataaaaacttgggagggaagcgtggaaatactaatttaacagttaacaagagttgcgtaaattgtggcaatatatgcacttagagagactctgtggtttaagagcacacaatattagggggactcaagtcagcagaattctagtgagctgagggaaaaatatacaggtaagatagtggaaaatggtttatataattgttttcatagagcattgatgggaagggaaacaggcacactgaaaaagtgagaggtaagggctcagtcagctggtgtttggagagtggaaccacatgccgtagggaatgtgatagattcatgaattagagattaatgctgcctttaatcaattctgaggtgcatattttcttttaatatctctgaaattggaatactttttacaaatggtatatcacagttcaattaacagtgtttttggtttttttttttttttgagatgtaatctcgctgtgttgccaggctggagtgcagtggcgcgatctcagctcactgcaacctctgcctcccaggttcaagcgattcccctgcctcagcctcccgagtagctgggactacaggcgcgcgccaccatgcctggctaattttttttattttagtagagacggggtttcaccacattggccaggatgatctccatctcctgacctcatgatccacccacctcggcctcccaaagtgctgggattacaggtgtgaaccaccatgccaagccaccacgcccagccgacagtgttttttatttcgtttgtggcacataaaatgatgcatccataacacaaggctcatggtattctacatgaagaaaacaatctaagtgatccagtcagagttacaaaaaagaatatcatagtaaaacccctcaaagtaggaggttgaaaataatagagcagaaattaattatttagggagattcacaaaacccagaagggcagtcttttaagaagacacataaggcatgattgattgtttctagttcaagagaaaagcacaaaaaagtttgagtggacataactacacttaaaaatagagatttttaaaacacactttaaaaaattcgaagtatactatacatatgacatttactatttgtactatttgaaattgtacaattcaatagtaaaaaatccatttatattctttttttccacccttcatctctctctccctactacccttcctggcttcttgtaaccacaattctactctctctctttgtgagatctactcttttagctgccacatatgagtgagatcatgtctttctgtgcttggattatttcatttagcataatgtcctccagttccatccctgttgctgcaaatgacaagatttcattcttttctatggccgaatactatttcattgtgtatgtgtatatacaccacattttctttatccattcatgtattaaatggaattgacgtaggatgattccatatttggactgttgtgaatagtgctgcaataaacatgggagtgcagatataccttcagtgtattgattttctttctgttggatatatgtatagtagtggaattgttggatcatatggtagtttacttctgtttttttttttttttttttttttttgaggaaccttcatactgttcttcgtagtggctgctctaatttacattcccactaacactgagggttcccctttctgcacatcctcaccagcatctgtagttgcctatctttttgatgcaagtggttttaactggagtgagatgatacctcattgtggttttgatttgcatttctctgatgattagtgatgttgagcattttttcatatatctgttaatcatttgtatgtcttttgagaaatgtgtattttagatcttttgcccattttaaaattggattatttggggcttgttttgttttgttgctactgatttgagctccttacatgttgttaattccttgtcagatggatagtttgcagatgttttatcccattctgtgggttctctcttcactttgttgattgtttcctttgcattttagcttgtattttcatttgtctatttttgctttggttgccagtgcttttgaggtctcatgcaaaaattatttgcccagaacagtgtcctggagcgtttctccaatgttgttttcttctagtagtttcatagtttgtgagatcaaagtagatctcacagagggaatagaattgtggttaccaattctactaattgagatcttagatttaagtcattaatccattttgatttgatttttgtgtgtgatgagagataggggtatagtttcattcttcagcatatagttatccagttttccccctaccatttattgttgctcttggcacctttgttgaagatgagctggctgcaaattgcgtggatttatacataggttttctgttctgttccattggtctatgtgtctgtttttgtagcagtaccatgctattttggttactgtagccctctagtatagttttgaagtcaggtagtgtgatgcctccagctttgttcttttggcttagaattgctttggctattcaggatattttgtggtttcatatgaattctgagcttaaagaaaaaattatgtgaagaatgtcatttcaattttgatagggattgaatctttaaattgctttgggtagtattgtcatgttaacaatattaatccatccaatccataagcatggactacctttgtatctttttgtgtcctcttcaatttctttcatcagtattttctagttttcctttatagatctttcacatctttggttaaattgattactaggcattttataatttgtgtacctattggaaataggattgctttcttgatttctttttcagattgtttgctgttggtatatgtaaatgctgctgatttttgtatgttcatcttgtatcctgcagtttcactgaatttatcagctctaacagttttttggtggcgtctttaggtttttgtaggtatgagatcatgttacctgcaaacaaggctcatttgacttattcgtttccagtttggttaccctttatttctttctcttgcctaattgctctggccgggacttccagtattgtattgaataacagtaagtgagagtggggcatccttgtctgtttcagtccttagaggaaagaccttcaatttttttccccattcagtattgatgttggctgtgagtttgtcattttgaggtatatttctactatacttatttttgttgggtttttatcataaagtgatgttcaattttacgaaatgctttttcagtgtctattgaaataatatgctttttttttttgagagagagagtctcactctgtcacccaggctgggagcacagtggtgcgatcccggctcactgcagcctccacctcctgggctgaactgattctcccacctcagcctcccaagcagctgaggtgggaggatcacttgagcccaggaggtggagactgcagtaagccgaggtcacaccactgcattccagcctgggtgacagagtgagaccctgtctcaaaaaacaacaaacaaaattttccactcattttcattagtcatttatttctatgggtacttttaatacatgcaggcagccgggcacggcggttcacacctgtaattccagaactttgggaggccgaggcaggcagatcacctaagattaggagttcaagaccagcctggccaacgtggtgaaaccccgtctctactaaaaatacaaaaaaaaaatttagctgggcatggtggcaggtgcctgtaatcccagctacttgggaggctgaggcaggagaatcacttgaacctgggaggcggaagttgcagtgagccgaggtcttgccattgcactccagcctgggcgacaagagcaaaactccatctcaaaaaaaaaaaaaagaaagaaaagaaaagaaagaaaaaaatacatgtaggcttatttcctggagtacatcattttcacttttgttctgtgaaacctagcagattttaaattcatatatgacactggaagttttattccaagccacatttatttgcataaaatgagatccttttggttttgttttctttactcgttcaattggtatatatttgttctttatactataagcagttattgtattactttttcctcatatgagtgacattgactgtttatatatatatatgagctgtttatatttccttttctctggattttgtttatattctttgacaatttttatgttgagtcattttcttcgatttgcagaatctcttatgttagaaggaatttgaccctttgcaatgatttttttttgtaccatgcctgattgtcttgtttgtgaattatgttttcttaaataacttgatgtttacttcttgttgttgttgttgttttgagacggagtctcgctctgtcgcccaggcgggagtgcagtggcgtgatctcggctcactgtaacctccgcctcccaggttcaagcaattctcctgtctcagcctcccaagtagctgggattacaggcacacaccaccatgcctgactaatttttgtatttttagcagagatggggtttcgccatgttggtcaggctggccttgaattcctgaccttgcagtccacctgcctccacctcccaaagtactgggattaaaggcgtgagccaccacacctggctactttctttttaagtaacttctttataactttttcttttctttttttctttttctttctttcttttttttttttaaatggagtcttgctctgttgcctaggctggaatgtggtggcctgatcttggctcactgcaacctccgcctcctgggttcaagcgattctcctgcctcagcctcctgagtagctgggactacaggcatgtgccgtcgcgcccggctaattttttgtttttttagtagagatagggtttcaccatgttagcgaggatggtctcgatctcctgacctcatgatccacccgcctcctcctcccaaagtgctgggattacaggcatgagccattgcgtctggacaactttttctaaataaagttacagtgaaggctgagtttcttgataaaaataaaaatagtgaaatttaatgacaggataaaaccttgttttattagtattttttgaatttagaaaagtattattttaacatggctaaggagactggggataatgtttgaaaatttgggagctttggctgggcgcagtggctcacacctgtaatcccagcactttgggaggcagaggcgtgtggatcgaggtcaggagatcaagaccatcctggctaacatggtgaaatcccgtctctactaaaaatacaaaaaattagccggccatggtggcgggcgcctgtagtcctagctactcgggaggctgaggcagaagaatggcatgaacccgggaggcagagcttgcagtgacccgagattgcatctctgcacttcagcctgggtgacagaggaagactctgtctcaaaaaaaaaaaaagagaaaagaaaaaaaaaaattgggagctttgtttgggccacagcgaacaccaaatatttaatttgatatagatacagatgtagtggcagctaaatctgagttactttccttctccttgttcttttgaatacagggtgagcatggacaatcttgtgccaaaatgcttgtgaatcgagcattgggccgctggaggcagcgtatgctccgagcagataacactagtgccatagtaatctgcatctctccagaagtggacaatcagggaaactttaccaatgaagatgagttatacctgaacctgactgacagcccttcctataatagtcaagaaacctgtgtgatgactccttccccatgttctacaccaccagtcaaggtatatagttccatagtttttaagttatgttttaatagacaccagttctttggttagcgtcacctggaaacaatttttaaattcttacaggattttggatttgaactcgattcaagaaagtgatgtaacttattatcagagagccatctttacatcaatactaatctgaatgccagccatgtgtacagcactaataaaaaggtgattgtgggcccttaagaatattattgtttgccatctaatgctatgaacattatttttaaagcatttagaagtttgtgaagcacttaaatatattttatttgaatctcgtagcccagaagtagagctaatgttattatttcattttatcagtaataagcctgagagattaaactgtctaaacaaggtcatagagaatcaaaattgagctggacctgaggatagcagacgttacaactggttgtctgttaactcgtataagaaactttattcctatttcttatccatgttaatattgattgagtttaagatatgctttgaaataagcaaattttaagtagatatcatacttttttgatttactaagaactcaaatacttggttgtgttttcatcctaatttttcccaccaaaaattagcagtattgattgataattgctttaatacatagcatggctaacctggctttctgagaatgtgttttcagtagactgaccattaaaatgggaaatgtagggaaatctaatgtcacctattcaggaagttttttaaagtgtcaaaggcctttaattttgggcgtcgtaatcctatagtcaatacttggaaatggattattactgctttgctttctttcactttacatacatatggcaaaaaccacatatggccagatacaatggaatgttttcatttctttttcttttttttgtttttgagacagagtttcactcttgttgcccaggctagagtgcaatggcattatcttggctcactgcaacctctacctcccaggttcaggtgattctcctgcctcagcctcccaagtagctgggattacaggtgcccgccactacgccctgctaattttttgtatttttagtagagatggggtttcaccatgttgtccaagctggtcttgaactcctgacctcaggtgatccacccgcatcggcctcccaaagtgctggtattataggcctggctgaaatgaagtattttcattcacaaaaggtttcttttctttgaaaaccatgaatggtaatgcaggttgaaaccctttaaagcctctttattctcttttcaaagctgtgaaagagcttatgtttgtatatttgcgtatttctgaatatttgtatgtaattattactttcatgttcccttataactgacctttaggcagtatagagaaggaggagacattagggtggggaatagtgtgaggaacaaaagggcattcttaatattgacctcaaataaaaattattgcagtctgctgactggcattagtaaacccatacataaaatacgtttaaaaaattacttaagctgggcacagtggctcatgcctgtaatcccagcactttgggaggctgagttgggcagataacctgaggtcaggagtttgagaccagactgaccaacatggagataccccatctctactaaaaatacaaaattagccaggtgtggtgatgcatgcctgtaatcccaggtacttgggaggctgaggcaggagaatcgcttgaacccaggaggcggaggttgcggtgagccaagatcgtgccattgtgctccagcctgggcaacaacagcaaaaccccatctcaaaaaaaaaaaaaaaaaaattccttaaattctgggctgggcgtggtggctcacgcctgtaatcccagcactttgggaggcagaggcacatggatcatgaggtcaggagatcgagactatcttagccaacatggtgaaaccccatctctactaaaatacaaaaaattagctggatgtggtggctcgtgcctgtaatcccagctacttgggaggcagaggcgggaatcgcttgaacccgggaggtagaggttgcagtgagctgagatcgcgttgcagcactccagcctgctgacagggcaagactccatctcaaataataataataataataattctgataatgacctaataatactactaaagtaaagataagaagacgtatgtttgccatatgcaggtatagttatttgttaacccattggccctgcccaaatatgggaaaatatttaggttaattcagaataattagtattgttggctctgatctaacaactaacaaaagacagatttctgcccaagaaattgtttttggtttgttttatttaccttaattgacataaaggtgagtactcctgactatatttaatttacatcattattaaagttgtctcatgtttagtaacatagagataaatttaattataatgtggttaatgttgaacagtcagagacttaatcacatttagacaaggcatttgagactagatttgtctgtaaacatgtcagcttccatttgaattctcacataaattagtctttgttttgggatggagatagtggaaaagcctttgtttaagtaagatagattactatgacacacatttctttctctgtcctttgtttagggcaaaactaaatttagctatgttttacaagctaagatctttaagaacggaatggggaagagagcaaagagtttcagaaaattaaaacttagttttagttgcattttaggcacagtttgtaattaattgtttaatattggattacagggtagatgggaggagaaagttgatctctgaagcagtgaacttttttaaagtatgtatttttaggggtaacctcaatatcacataactgttttacgaacatgcaggccttagcaatacaaattaacctggggtacatctaagaagtctaaacagttgcctgtgctaacagatacaatgtattcccacagaatgccaataaaaagagaattcccttcagaaatgttcaagaagaaagtaggggaagggaagccagcacacctgtggtgtcagaataatattctgtgcatttaggctgggtgtggtggctcacgcctgtaatcccagcactttgggaggccgaggcgggtggatcacaaggtcaggagttcgaggccaatatggtgaaaccctgtttctactaaaaatacaaaaattagctgggtgtggtgacatgtgcctgtaatcccagcactttgggaggccgaggcaggctgatcacccgaggtcaggagtttgagaccagcctggccaacatggtgaaatcctgtctttactaagaatacaaaagttagctgggtgtggtggtgggtgcctgtgatcccagctacttgggaggctgaggcaggagaatcgcttgaacccaggaggcggaggttgcattgagccaagactgtgccattgcactccagcctgggcaacaagaatgaaactctgtctcaaaaagaaacaaaaacaaaaaaacagagaagtgatgtatttggggcagtaccagattagtaactagaaattctttgtccttttcttcagtgtccattggtcctaaagtctatatatatatgtgtttttcagtaaagcatattcatatctatgattagatcgagatcattttagaaacgagtttctgggccgggtgtggtgggtcacttaaggtcaggaatttgagaccagcctggccaacatggtgaaaccccatctctactgaaaatacaaaaattagctgggcatggtggtgagcacctctaaccccagctactcgggagggtgaggtgggagaatcgcttgaacccgggaggcagaggttgcagtgaacagagatcgcgccactgcactccagcctgggtgacagagcaagactcggcctcaaaaaaagaaaaaaggaagcttctggatgccttcaatttccctttcattttattttttgaacctccctgcctcccttatttccctttgtttttaactctagacaaattaaaggaaacattcctatgataagtatacttttatatagcacttctaagaaagttgtatattcaggctgggcgcagtggctcacgcctgttatcacagcactttgagaggccgaggcggacagatcacctgaggtcaggagatcgagaccagcctgaccaacatggagaaaccctgtctctactaaaaatacaaaaaaaaaattagctgggcatggtggcgcatgcctgtagtcctagctactcaggaggctgaggcaggagaatcccttgaacctgggaggcagaggttgtggtgaaccaagattgtgccattgcactccagcctgggcaacaagagcgaaactccatctcaaaaaaaaaaaaaaaaaaaaaggaaaggtgtttatttataggagattttatttcggagaaagatcagataaatacgtcttcatttgctgctctgcttgggcttttcagaatctattaatattttgatacatttgattgagagtccacttgaggaaaattttacatgtttgggggagagagtatttatgctttaactctggaccttgataaagtattaagacaatgattttatgaaatgttattactttggaagagctgggtttgatagtaagaatgttcttatctggaggtgagcggctattctgagtatatgtagatttagagcactacactcaaagtagtggtgcatatctagattgacatgaagcgttgtgaaaacagcatttttaaaaacaataaagtgccttggataattctcatttgttttcatcaattgggaatttccctaaccattctcagaatggtcccatgtgtactacttttctcaaatcacagagcagtatctagtgtttgcaggatgggtgcaaagcagcattcttctgagtttccattatgaccattatgacatagttgctttaatgttgtactttgctttaatgatgtgctttaatgttgtaatgctttccacactacatactcagaaattagaatttaggagataggataaaccaaaaaactacaaatttgttgcttatcctactgagatgctaccatcccctccagtggttacactggttttcattactagaaaattcagatttttatttttaattttaatatttatttatttattgtgagacggagtctcactccgtcacccaggctggagtgcagtggtgcgatctctgctctctgcagcctccacctcctgggctcaagcagttctcctgtctcagcctccagagtagctgggattacaggtgcacaccaccatgcctggctaatttttgtatttttagtagagacgcagtttcaccatgttggccaggctggttttgaactcctgacctcaaatgatctgcccgcctcgacctcccaaagtgctgggattacaggggttagccagtgtgcccggccaaaaattgagatctttaaaagcttttttttcttttttgaaatagggaacgcttcatgaatttgtgtcatctttgcacaggggccatgctaatcttctttgtatcattccaattttagtatatgtgctgctgtagtaagcacttaatggcatcttaaagcaattttttgatggttcttatggaaaaatatgacttttatgaaaaatagagcgatttcatcagcattatgttattaccaaaagtaaattaaaatgcacacagagaatgcgatacttttgatcttctccatgtttgagtacagaatagtggaagagtgaatgtgtgcctatggttaattttgagggtttgttttgaaatcttgttccttaatgtatcttatttttgtttacctgccaatggatagaaaatgcttgtgaccacgtgaattttcacccacttgaatagattactttataatttcatctattaccctgaagacagaattcaatgtcattcttacctttatattgtcttctcactcaggttcctcccattaaaccttaacacatagttcagtaaatagaaggtgaacgaattagtgaatgcataccccgtttttgccatcctactagcttcataagaagcctaatatcacatgcatagatttgttgagttctgggataaattttttcttatttgttttaccttcttatttttcagtcactggaggaggatccatggccaagggtgaattctaaggaccatatacctgccctggttcgtagcaatgccttctcagagaattttttagaggtttcagctgagatagctcgagagaatgtccaaggtgtagtcataccctcaaaagatccagaaccacttgaagaaaattgcgctaaagccctgactttaaggatacatgattctttgaataatagccttccaattggccttgtgcctactaattcaacaaacactgtcatggaccaaaaaaatttgaagatgtcaactcctggccaaatgaaagcccaagaaattgaaagaacccctccaacaaactttaaaaggacattagaagagtccaattctggccccctgatgaagaagcatagacgaaatggcttaagtcgaagtagtggtgctcagcctgcaagtctccccacaacctcacagcgaaagaactctgttaaactcaccatgcgacgcagacttaggggccagaagaaaattggaaatcctttacttcatcaacacaggaaaactgtttgtgtttgctgaaatgcatctgggaaatgaggtttttccaaacttaggatataagagggctttttaaatttggtgccgatgttgaactttttttaaggggagaaaattaaaagaaatatacagtttgactttttggaattcagcagttttatcctggccttgtacttgcttgtattgtaaatgtggattttgtagatgttagggtataagttgctgtaaaatttgtgtaaatttgtatccacacaaattcagtctctgaatacacagtattcagagtctctgatacacagtaattgtgacaatagggctaaatgtttaaagaaatcaaaagaatctattagattttagaaaaacatttaaactttttaaaatacttattaaaaaatttgtataagccacttgtcttgaaaactgtgcaactttttaaagtaaattattaagcagactggaaaagtgatgtattttcatagtgacctgtgtttcacttaatgtttcttagagccaagtgtcttttaaacattattttttatttctgatttcataattcagaactaaatttttcatagaagtgttgagccatgctacagttagtcttgtcccaattaaaatactatgcagtatctcttacatcagtagcatttttctaaaaccttagtcatcagatatgcttactaaatcttcagcatagaaggaagtgtgtttgcctaaaacaatctaaaacaattcccttctttttcatcccagaccaatggcattattaggtcttaaagtagttactcccttctcgtgtttgcttaaaatatgtgaagttttccttgctatttcaataacagatggtgctgctaattcccaacatttcttaaattattttatatcatacagttttcattgattatatgggtatatattcatctaataaatcagtgaactgttcctcatgttgctgaatttgtagttgttggtttattttaatggtatgtacaagttgagtatcccttatccaaaatgcttgggaccagaagtgtttcagattttttaaaattttggaatatttgctttatactgagcttttgagtgttcccaatctgaaattcaaaatgctctaatgagcatttcctttgagcatcatgcctgctctgaaaaagtttctgattctggagcattttggattttggattttcagattagggatgcttaacctggattaacattctgttgtgccatgatcatgctttacagtgagtgtattttatttatttattattttgtttgtttgtttgagatggagtctcactctgtcatccaggctagagtgcagtggcgtgatctcggctgactgcaacctctgcctcccgggttcaagtgattctcctgcctcaatctctctccccagaagctgggattacaggtgtgtgccaccacacccggctaatttttttttttttttttgagatggagtctagctctgtcatccaggctggagtgcagtggtgtgatctcggctccctgcaacctctgccttctgggttcctgcgattctcctgcctcagcctcctgagtagctgagattacaggcacgcgccactgtgcccagccaatttttgtatttttagtagagatggggtttcacatgtcagtcatgctggtcttgatctcctgacctcgtgatccacccgcctcgacctcccaaagtactgggattacaggcgtgagccaccgcatccggcctgagttttatgctttcaatgtatttcttacatttcagttcaagtgattttcatgtctcagcctcctgagtagctggaactacaggtgcgtgccaccatgcctggctaagttttgtatttttagtagagatgggttttcatcatgttggccaagatggtcttgatctcttgacctcatgatccaccagcctaggcctcccaaagtgctgggattacaggtgtgagccaccgtgcccagccaactatgccattatttaaccatgtccacacattctggttattttcaatattttgcagaagataattcttgatcggtgtgtcttatgccacaaggattaaaatatgtattcattgctacaaaacaatatctcgaaatttagcagtttaaaacaacaaatattatctccagtttctgagcctcagaaatctgagagtggtttagctgggtgatagtctcgtggttttggtcaagctaccaaccagggctacaatctttcgaaggtgtcattggggctagaagatctgcttcccgcaagactcacagctgttggcaggagacctcagtttgttgccacatgttcccctccagagggcctctcacaacatggcagttatttgtccccagagcaagcaacaccggagggcaaggaagaagccatgatgttttttgtaacctagcctctgaaagtgtcataccaattctgtattttgttggtcacacagaccaagtcaactacaacgtgggagactcctacacaaggcatgaattctaggaggtgggcatttttaagtgtcatctggaaggaggctgtcacaacctggaagttaaaagcattgatattctgaaatacagcgtgtataacattgttttagtagggtgtgcaatagttatgttttggtaatagcattaatgaacaatgttattttcatcttccagacatctggaagattgctctagtggagtaaaacatcttaatgtattttgtccctaaataaactatctcactaacaaagttgagaataattttttttttttttaacagggtctcactgtccccaggctgatgtggagtgcagtggcaaaatcataggtcactgtaacctttaactcctgggttcaagtgatcctcccatctcagcttcctgagtagctgggactacaggtgcatatcaccacacctggtggattttaaaaatttccttagagacaaggtctcactgtgttgctcaggctggtcttaaattcctggcctcaagtgatcctcctgcctcggcctcccaaagtgctaggcaaattttaatcttagagacaaaatatttaggcagtattagtggttgcattagggattacaatgtacatacacttatagactacttagaatcaatgttctatgactaaaagtggaat

SEQ ID NO: 64 - DNA, 4790 bp, Homo sapiens
ggggaagcgcagtgcgcaggcgcaactgcctggctctgctcgctccggcgctccggcccagctctcgcggacaagtccagacatcgcgcgcccccccttctccgggtccgccccctcccccttctcggcgtcgtcgaagataaacaatagttggccggcgagcgcctagtgtgtctcccgccgccggattcggcgggctgcgtgggaccggcgggatcccggccagccggccatggcggggctgtactcgctgggagtgagcgtcttctccgaccagggcgggaggaagtacatggaggacgttactcaaatcgttgtggagcccgaaccgacggctgaagaaaagccctcgccgcggcggtcgctgtctcagccgttgcctccgcggccgtcgccggccgcccttcccggcggcgaagtctcggggaaaggcccagcggtggcagcccgagaggctcgcgaccctctcccggacgccggggcctcgccggcacctagccgctgctgccgccgccgttcctccgtggcctttttcgccgtgtgcgacgggcacggcgggcgggaggcggcacagtttgcccgggagcacttgtggggtttcatcaagaagcagaagggtttcacctcgtccgagccggctaaggtttgcgctgccatccgcaaaggctttctcgcttgtcaccttgccatgtggaagaaactggcggaatggccaaagactatgacgggtcttcctagcacatcagggacaactgccagtgtggtcatcattcggggcatgaagatgtatgtagctcacgtaggtgactcaggggtggttcttggaattcaggatgacccgaaggatgactttgtcagagctgtggaggtgacacaggaccataagccagaacttcccaaggaaagagaacgaatcgaaggacttggtgggagtgtaatgaacaagtctggggtgaatcgtgtagtttggaaacgacctcgactcactcacaatggacctgttagaaggagcacagttattgaccagattccttttctggcagtagcaagagcacttggtgatttgtggagctatgatttcttcagtggtgaatttgtggtgtcacctgaaccagacacaagtgtccacactcttgaccctcagaagcacaagtatattatattggggagtgatggactttggaatatgattccaccacaagatgccatctcaatgtgccaggaccaagaggagaaaaaatacctgatgggtgagcatggacaatcttgtgccaaaatgcttgtgaatcgagcattgggccgctggaggcagcgtatgctccgagcagataacactagtgccatagtaatctgcatctctccagaagtggacaatcagggaaactttaccaatgaagatgagttatacctgaacctgactgacagcccttcctataatagtcaagaaacctgtgtgatgactccttccccatgttctacaccaccagtcaagtcactggaggaggatccatggccaagggtgaattctaaggaccatatacctgccctggttcgtagcaatgccttctcagagaattttttagaggtttcagctgagatagctcgagagaatgtccaaggtgtagtcataccctcaaaagatccagaaccacttgaagaaaattgcgctaaagccctgactttaaggatacatgattctttgaataatagccttccaattggccttgtgcctactaattcaacaaacactgtcatggaccaaaaaaatttgaagatgtcaactcctggccaaatgaaagcccaagaaattgaaagaacccctccaacaaactttaaaaggacattagaagagtccaattctggccccctgatgaagaagcatagacgaaatggcttaagtcgaagtagtggtgctcagcctgcaagtctccccacaacctcacagcgaaagaactctgttaaactcaccatgcgacgcagacttaggggccagaagaaaattggaaatcctttacttcatcaacacaggaaaactgtttgtgtttgctgaaatgcatctgggaaatgaggtttttccaaacttaggatataagagggctttttaaatttggtgccgatgttgaactttttttaaggggagaaaattaaaagaaatatacagtttgactttttggaattcagcagttttatcctggccttgtacttgcttgtattgtaaatgtggattttgtagatgttagggtataagttgctgtaaaatttgtgtaaatttgtatccacacaaattcagtctctgaatacacagtattcagagtctctgatacacagtaattgtgacaatagggctaaatgtttaaagaaatcaaaagaatctattagattttagaaaaacatttaaactttttaaaatacttattaaaaaatttgtataagccacttgtcttgaaaactgtgcaactttttaaagtaaattattaagcagactggaaaagtgatgtattttcatagtgacctgtgtttcacttaatgtttcttagagccaagtgtcttttaaacattattttttatttctgatttcataattcagaactaaatttttcatagaagtgttgagccatgctacagttagtcttgtcccaattaaaatactatgcagtatctcttacatcagtagcatttttctaaaaccttagtcatcagatatgcttactaaatcttcagcatagaaggaagtgtgtttgcctaaaacaatctaaaacaattcccttctttttcatcccagaccaatggcattattaggtcttaaagtagttactcccttctcgtgtttgcttaaaatatgtgaagttttccttgctatttcaataacagatggtgctgctaattcccaacatttcttaaattattttatatcatacagttttcattgattatatgggtatatattcatctaataaatcagtgaactgttcctcatgttgctgaatttgtagttgttggtttattttaatggtatgtacaagttgagtatcccttatccaaaatgcttgggaccagaagtgtttcagattttttaaaattttggaatatttgctttatactgagcttttgagtgttcccaatctgaaattcaaaatgctctaatgagcatttcctttgagcatcatgcctgctctgaaaaagtttctgattctggagcattttggattttggattttcagattagggatgcttaacctggattaacattctgttgtgccatgatcatgctttacagtgagtgtattttatttatttattattttgtttgtttgtttgagatggagtctcactctgtcatccaggctagagtgcagtggcgtgatctcggctgactgcaacctctgcctcccgggttcaagtgattctcctgcctcaatctctctccccagaagctgggattacaggtgtgtgccaccacacccggctaatttttttttttttttttgagatggagtctagctctgtcatccaggctggagtgcagtggtgtgatctcggctccctgcaacctctgccttctgggttcctgcgattctcctgcctcagcctcctgagtagctgagattacaggcacgcgccactgtgcccagccaatttttgtatttttagtagagatggggtttcacatgtcagtcatgctggtcttgatctcctgacctcgtgatccacccgcctcgacctcccaaagtactgggattacaggcgtgagccaccgcatccggcctgagttttatgctttcaatgtatttcttacatttcagttcaagtgattttcatgtctcagcctcctgagtagctggaactacaggtgcgtgccaccatgcctggctaagttttgtatttttagtagagatgggttttcatcatgttggccaagatggtcttgatctcttgacctcatgatccaccagcctaggcctcccaaagtgctgggattacaggtgtgagccaccgtgcccagccaactatgccattatttaaccatgtccacacattctggttattttcaatattttgcagaagataattcttgatcggtgtgtcttatgccacaaggattaaaatatgtattcattgctacaaaacaatatctcgaaatttagcagtttaaaacaacaaatattatctccagtttctgagcctcagaaatctgagagtggtttagctgggtgatagtctcgtggttttggtcaagctaccaaccagggctacaatctttcgaaggtgtcattggggctagaagatctgcttcccgcaagactcacagctgttggcaggagacctcagtttgttgccacatgttcccctccagagggcctctcacaacatggcagttatttgtccccagagcaagcaacaccggagggcaaggaagaagccatgatgttttttgtaacctagcctctgaaagtgtcataccaattctgtattttgttggtcacacagaccaagtcaactacaacgtgggagactcctacacaaggcatgaattctaggaggtgggcatttttaagtgtcatctggaaggaggctgtcacaacctggaagttaaaagcattgatattctgaaatacagcgtgtataacattgttttagtagggtgtgcaatagttatgttttggtaatagcattaatgaacaatgttattttcatcttccagacatctggaagattgctctagtggagtaaaacatcttaatgtattttgtccctaaataaactatctcactaacaaaaaaaaaaaaaaa

SEQ ID NO: 65 - protein, 605 aa, Homo sapiens
MAGLYSLGVSVFSDQGGRKYMEDVTQIVVEPEPTAEEKPSPRRSLSQPLPPRPSPAALPGGEVSGKGPAVAAREARDPLPDAGASPAPSRCCRRRSSVAFFAVCDGHGGREAAQFAREHLWGFIKKQKGFTSSEPAKVCAAIRKGFLACHLAMWKKLAEWPKTMTGLPSTSGTTASVVIIRGMKMYVAHVGDSGVVLGIQDDPKDDFVRAVEVTQDHKPELPKERERIEGLGGSVMNKSGVNRVVWKRPRLTHNGPVRRSTVIDQIPFLAVARALGDLWSYDFFSGEFVVSPEPDTSVHTLDPQKHKYIILGSDGLWNMIPPQDAISMCQDQEEKKYLMGEHGQSCAKMLVNRALGRWRQRMLRADNTSAIVICISPEVDNQGNFTNEDELYLNLTDSPSYNSQETCVMTPSPCSTPPVKSLEEDPWPRVNSKDHIPALVRSNAFSENFLEVSAEIARENVQGVVIPSKDPEPLEENCAKALTLRIHDSLNNSLPIGLVPTNSTNTVMDQKNLKMSTPGQMKAQEIERTPPTNFKRTLEESNSGPLMKKHRRNGLSRSSGAQPASLPTTSQRKNSVKLTMRRRLRGQKKIGNPLLHQHRKTVCVC

SEQ ID NO: 66 - DNA, 140929 bp, Homo sapiens
agtattgttactcctgccccatcccagacctccttaatcagaatctccaaaaggcctgcgggggtagaggagggtaacctagtcatgcatatttttcaaaagctccctaaattagattttgttttcccaattgaaaggtttggtgctatcccattctgagcattttattaatatcaccaaagacccatgtccgattaatgatttcagtagatggcgctctttccacctgccagcttccttgcttggcggaatgaaccctaagccattcataaaagtcaagggcaggtcaaaggtgcaattcccaccaatattgaaaacatacactagaacttacctttgcaaaccaattgttagtcggttaagacacacgttaaagtggtggtggggaaggggtacagtatcacatttgcttattacatgaatgtaattattcttctgaagagttcaagaatgtcaactccctggcacaaaattggaaactaaagaaacagagtagaaagcagtgattttttttataaagtagagatttggacaaaagaggtttttttaaaaatatgagaaagatataggaaatactgatgttactgctatacaacatactgtgtgaaaaacttatgatggggcaaacatagatgtctgtatctgctaaattgggagacagcaccaggtagcctgcaagatcatcagctttagagtcagctaaccctgattgagacaattcttcccgctattttatagcaaccaagttacttagcccttaattctcaacaagatattacctactttacttggttataataagcattaaattaaaagagataatgaatgtaaaacaattatttcaatgcttggtgcacagccagtatttaaccaataaacttacttttggagtgctaagtaaatgtaggtgctgagtttttaattttttaagtagcaaaggataatagaaaattaacatgaggttttgaagggaagattcctttaccagtcagtactaataatggtgagaaaaaaattagaggaggataagcaggaaaaaaacagaaggttagctttggtataataaaaaaggcctaaaccttaattcacaaaatttagatttgtaaggtgctctctatttacaggatgtctgaccctaagtaaatcaattaatctcatctttaatatttatatgatggaaattacattaaataaatcacttaacctcacctttaatatttatatgatggaaattacattaaatgccatttttaatatgacatcattttgcatattaagtcataatacacataaaatgccaaaaaactatagagtcctataaaatggtgctgaggtaattattaatagttaaattttattgattactgaaattcatcaataaagttaaaaattattctttcaaaataaaatgagatactaagtgagttagtaaatttggatgaggacaaaaagagtagttactggattgtgaagtcagaatttatgaaaagaaaaagtattccctaaaattgtaagagattggtattagcaatatttgcaataattgtggaggaatttccatgatgttgtcccactaatgattctaatattctttcattttctttttgagacagagtcttgcactatcacccaggctggagttcagtggtacaatcatggctcacgtggctcacagtcttgaattcctgggcttaagtgatcctcctcagtaatattctttctataatgcctttgccaatacttttcagtttatcttatattctactttgcccccattaaattagtacacacattggatagttcctgatttcattaatttaatattatataatttgtattttttccttaaaattttcaaattatataaagaaaaattaaccaaataaaatcagattaggaaaaaagtaactagaaatcataagagattctatcgagattctcatcatattataatccctgggtttagacaataatttttattaataataatttatattaataagctaaaatattatatctcaatatgtcatctattggagactgttgaaacttagtattctgtgttaaatacgtacctacatataatgtgcagtaatgtaaccaaacaaaataaataagaaagctttttaaccgcagtgactgctatgctgtttgatggtcaattgtcttttaagcatacagagaatctttatcatgttatacttcagaaacatgtttttggagatgggaaacaacaggccatgattttatgtttttgttaaaccagtataattctttcaaagcagtgtatatcacaactatttctctgtgttgaagagagtatcaagttcttaaagaaaaatgtaatcccagcactttgggaggctgaggtaggaggagcacgaggtcaggagttggagagcagacaggagaattgcttgaatccgggaggtggaggttgcggtgagcagagatcgcgccactcactccgtcctgggtgacagagtgagactccgtttcaaaaaaaaaaaaaaagaaagaaagaaagaacattttctattctgcaggtgggaggaaatgaagaatgcacctattatttttgtgttagtacaacataaaaaaaatttgcattgtaaagcaaactaccatcatcagctctttaatggacagcagcagacaggaaactgcctccaccctgagacttaaagactgagcaactgagttagatagcaggtgcgcaggccaatcaagtcaattttctaacacagagtagcatgttgtggaacttgttctattagtcttttttctctgttaaggaagcaaggatctctctgtatggaagcagtgctgctatttctagtttgaggaaaaaaatggtaaagaatttgataattaattgttgttaaaacagcaaattatattttaaacacagattgtccacacctgtaggaggaggaatctcaagaatgcacacaattaataaaagctggttctgaattacccatacaagtgcgcactgcgttcagtaaacaactgatttgcaaactatatcctttctttcccagaaatagcaggaggaagtttttcaaatcaaaaaaaaaatctaactaaaatattttatacgtgaaggcctgcagaattttacttccttttgctgttgaaaaatcacaatagccaagaggagtaatgtattttattttaacttttaaaaagtcatgatggttaagggtagagtggaggtgcagagaaagaagttggcaagaaaatgttcagggcctgttgtaaaaccaactgcaacccaaacatgattccaaataggtaagaacaccctgttacaacagagagcagttttcaaagaagaaatgagagggaggtgacctgaaagatcatttcccagttataactaaaggaacctacggatacttttatattaaacacatgctaatataatattttccacatattattaaatgtaagaagatatataattatatacttctatagtcagaaacaaaataactcctagaagtaaatggtttgttactgtagtagtagtaactacctgggcacttacctagtgctcttattaaaaactcaccacaactctgctgtcttacaggttgttgaacagattgaaagaaaccgataccgagagagttaagtaaaatgcacaaggtcacactggaaaagatagagttaagagtcactcagctctgtaaaactccaaagcccatgtttcaacaactctgcaatactgtgcactgtataaatgtatgttgtggtcttgagagaactttatttcctggacttgaaaaatacatcacaagccgggcgcggtggctcacgcctgtaatcccagcactctgggaggtcaggagttccagaccagcctggccaatatggtgaaaccccgtctctattaaaaatacaaaaaatagctgggcgtggtggcgcacgcctgtagtcccagctactccggaggctgaggcagaagaatcgcttgaacccggaaggccgaggttgcagtgagccgagatcgcgccactgcactccagcctgggtgacagagagaggctgtctcaagaaagaaagaaaaggaaagaaaagaaagaaagaaataaagatcacaaagaactttcaaacagcttagattttaaagtgcattaacaatttccaagacctaagtgacgctttagtgtacagctagaaaacatggaatgtcattcccacctgaaatgtttaagggaaaatgtactatttccttagtttgtgcaaaatctgaaatctgagtcaactttgtttcaaaatggaataaacaaagtttgattggacccactaaacattcttcttagcaacaatgcgacacttgcaaggagttccctttttcacactcttcaaagaggaaatattccgatttcgtaaaattagggcttcgcttttaaaaaaaattacagaccaaaaaaagtgtggttacacaatataactagtattgacttaagggtactgtgatcaccatgcagtgatcccataaaagatgtgaccaaaatacccacttaaaatttgaacgtcagtcatgtaagaacatgtaaaagatgaagggaatatttcaaaaacgactatctgacgtaatatgatacttactatgactcatatgggctttgttcttcatctcatcttcaaataaaaagttgatgattagaaaaaggagcattagaagggggaagtaacactactcggcaatagagaaaaactccggtcaaaggaagagcatagttacagagctccgaatgtcagggaaaatcaagcatccgtcattcggaattagctctgtatcggtcggtttcttcattacttaattgtacggggggaaactacttcaaagtaagggctcttacgagaggcaacttaagcatttgaaagtgcaggtttatttcctcctagcgagaagtagggggtcactagtgagaaacctatttcaatctgtgagacgcccccttctactcagcccacgtggctaaagtaaacagaaggtgggccggggcggggagaaacagaactcggtcaatttcccagtttgtcgggtctttaaaaatacaggcccctaaagcactaagggcatgccctcggtgaaacaggggagcgcttctgctgaatgagattaaagcgacagaaaagggaaaggagagcgcgggcaacgggatctaaagggagatagagacgcgggcctctgagggtaaggtgggcgcaagcggaggtgtggtgcggggagaggtgccagtgggtggaggcgggggccagagcgagggcacgtgcgggtacactccggaggaggtgggtgcgcgcgggggcgtgtgcgcgggacctcgaagtggtggtggagtgcagaccagcaaaaagtttcaaagggaaatcttagatgtcacgtctttgtccaggcacccgtgccatcccaacctcccacctcgcccccaaccttcgcgcttgctctgcttcttctcccaggggtggagacccgccgaggtccccggggttcccgagggctgcacccttccccgcgctcgccagccctggcccctactccgcgctggtccgggcgcaccactccccccgcgccactgcacggcgtgagggcagcccaggtctccactgcgcgccccgctgtacggccccaggtgccgccggcctttgtgctggacgcccggtgcggggggctaattccctgggagccggggctgagggccccagggcggcggcgcaggccggggcggagcgggaggaggccggggcggagcaggaggaggcccgggcggaggaggagagccggcggtagcggcagtggcagcggcgagagcttgggcggccgccgccgcctcctcgcgagcgccgcgcgcccgggtcccgctcgcatgcaagtcacgtccgccccctcggcgcggccgccccgagacgccggccccgctgagtgatgagaacagacgtcaaactgccttatgaatattgatgcggaggctaggctgctttcgtagagaagcagaaggaagcaagatggctgccctttaggatttgttagaaaggagacccgactgcaactgctggattgctgcaaggctgagggacgagaacgaggtcagagcgcttctcttatgccgcgaaactctccctttcttctccccttcgctttttctcgggcttccagggactggggagcaaaccctgtagtgtcacccacaaataccaagagggaagagggaagcttcacaaattactggagcctcttcaacatggctgacaaatatagttttaattccctctaccccttttaaacctgtagttctgtgttctcttctctcctcctaatgctcgtcccctcatctcccagaaaacttacctttgtgcctccgacgagccggtttcccggccttttttaatcctcagaaaagtgatttttaaatttgctttcctttctaaaatagttcagctttgggggcactacttttccctttaatcctcttcccctgtttctttcgtgtaagtgaaacgagtctcccgtttatcctgaacaacctcagagagaacactgatagggtgtttttcgacccttttatcagctgtagggtctgggtctgggtttgtgtctgcctcctcctaccttcttatccccctttagggggctgtacgaagtgaatgtcacagggagtggaattggagtacactgagtgggttttttttttccttaagtccgcgcgttttgttagcggcgctgagtgaaagaggaaagaatagtttctctggttccccaaacaagaccagaactcacttttctcaaggtacataagtcagcgctgggctgagccttccagcctggggaatgtatgtaagagaatttatggacaaatctgtgtcccggctttgtgcttctcccgaatcagcttcgtttggttccttggtaagtgacaggcagacacaaaggcaggcgcaggcccggggagggggcgggagggggtggggagcgcagcgttggagttgcaagactgcaaggtcaggggcgcctaaagaaatgaaacccaatcccagcaaagaagtgaagagcagatttataacagtcccatccaaatttctctttggcttctctctttggtctttcatctctctgcctttctctctgtgtctcctctctactctttcttctctctctctcatacacatacacacacacacacacacacacacctcactcgcatcttgctgaatcttttcactgggactgcttgtctagttttattaagctaatagggtttgtatggagagttttctacctatgacataatgaagtgtggcctggatagactcctggaaaggccgaaaatgaaatataagtgttatttgctggttattcccctcatgatatacttttaattacattgagggagttctcccttcttcatctaatgtttaagaattgagaaaaggcttattttccagcggtaaaatttagtgcataaaatttagtgaaatatttatatatttacgtgtctagggagtggaatacattcatgaatttaatatctcaaatcacacattgtgctttttccccttcagtcagggattataatgggaaacccaaattcaaagatattcatcaacaaatgatccatcataggaataagattgtatcttaagggaagttgggattcacagagaaaagacattggtttggtttggtgtgatactgtgggtattgttgcctggctaatgaaatcattacatttgcattttaatggaaagttgaaatactaaggggagttatgttcttttacatgtttgtatgtgtgcttaataatgtttggaatagaatataaatttaaacacaataaatattgatttttttaaatgttaataagcagagaacggttaatgaagtgttggataatcaaactgaagtttagaagacaatttataggattaaaaaatggatagaaggaaaaacacaataatagatatttctccataagtcgaatttccaaaactatttgtcctcgatagttcactttgtaactttctattttgatctttgttaatttaatgtagtttgctttaatcattgatacgtggggttctttcacatgattacaagggagaagcattactcatctctgtggaatagaaacggttcattggttagttcttatttgccctaaaattaaaacaaaaattaggattttaccattaatgctgttcatggtaaactatcgagaaaactatggttaattattccagcaattcagaattaaaaacaattccttttgctaacaaactaatatttactttttggggacaacttttcaaatgttgtggtatatactgtcttcaggctactcaactaataatagatacaacattttccactcaataaataagaataactacattggttaataattttgaatacaactatgaaggcttgttttttcctgtcatcaaatttagattcttgttattttgtgcatcctacttttatactgaaaatagctgctaattaatactgtataaagtatttcagtgattataaggaagagatgtgtatgttagtcactttatcctttgttggaaaagagaaattattttaataagtatggggtagtttacaataaaagacataacctcagttctttctttaccatatatgtgatcatactacctaggtgctccaaaaattccataggactgtcttgggttattgaattttaggaacatgataatggacaataacaagatagatagcttttcttaactatgacattgttttgcttattttcttattgaactaatcatcaatgagaaattaagttgcagtgagagaaatcccttgctttgtttaaattgtcatatttgccaaactcttcttaaggctttaattaggtctgatgtgccagtttatgccagaagccggaggaattgatatgattttgaggcagtggcacatggtcctactagacattggcaagtgaatatcacttccagaacaagtgaagtgcacctgccaaggagttgttatgaaagaattccaaagtccttattgggcactggtcttgtattaggtaacaacaactggagttaatgttttagtttcacttgttgaagttaaaagttccctatcaattcttctaagactccacccccaaacaatgttgtaagtcaaatgtcactattgaaatgtatttccttaattactgacctcattaagaagcccttcttatgattcataggcacacctcacagaaactctattttccatcctgcccaaagtctgagtaggtaaattcttatgaattcttatgaaattaccttgaaataaaatatcttcaaaagttacggatgctagacattgtataatgtcaatattttagaatatctaatatttagaaaatcttagatctactttttatgctttaattgcttctaatgcaagttaaattgtttttgttgttattgttttaatagaatttcatagtcttatctagcaatttcaaatcgctggaaagagtcatctttgttatataaataaccatgtagactgttttaatgttattgtttcctaccttgggaacaggctaaaactttggaccagctgtcagtatttgttcatcagaataacactttgtcaatgattattctaccattgcacagtagttcttaaggatagtaatggtaccaaagccagcagcaatagaatatctcccaagccaactttacaattggagccttcactgtgggaaagaccagttgccaagtagagctggtggttatctgggaaactgtgctgaagaacacaaccacaaatgattttgccaaatatacagtatttacttggtctagatctccaatttctatttctactcactgccaaaactgagtgaatactgtgacattattgaaggaggttatgcagtacatctgttggtttggtatatagtaggagagaagggttccaggagggaaaggggaaagtcagagcatgtgaatcactgtgactacaatccaaaaagaattatgtatgtctgctatttccagcattatttttgtcctatattgtacattgcagagacttgctgacttaaaatagatatataatctttttctcaaaagaatagatatttggttgtccattccaaataacaaattttggatgggcgtggtgactcatgcctgtaatcctagcactttgggaggccaaggtgagagatcacttgaggccaggagtttgaaaccaccctgggcaacacagtcaggccccagtctctacaaaaaatttaaaaagttagtggggcatggtggtacattcctgtagtcccagctactcaggagactgagataggaggatggattgagctcaagtgttctaacttatagtgagctctgatcacaccactgcgctccagcccaggcaagagggagagaccctatctcaaacagcgacaacaacaaaaccaaacaaacaaaaaagcacattctatcagctttgatttatgttttcttcatttgtaatgacatgtagttaaatgtgtcatacttcaaaaagaagaaacagatagtaggtggattttcaatataatatatattagatatagataatatatattttcaatatataatatatgtaaaaataaattcagtgataatatcatcctacctgcagttttaagaattcagaactcaggccaggtgtggtggctcattctgggaggggaaggcaggaggatcacttgaggccagaagttctagaccagcctgggcaacatagtgagatacctgtctctattcaataaaaataaaaataaaaataattcagaactcaatgctttatactcactgaaagttgttcctctaaactgacttgaaatcatgttccaaataaactgagaattaaagtaagagacgaggccggttgtggtggctcatgcctgtaatcccagcactttgggacgacaaggcaggtggatgacctgaggtcaggagtttgagaccagcctggccaacatggtgaaaccctgtctctactaaaaatacaaaaattagccgggcatggtggcacacaccagtaatcccagctactcaggaggctgaggcccgagaatcacttgagcctgggcatggtggctcatacctataatcccagcactttgggaggccgaggcaggtggatcacctgacgtcaggaattcgagaccagtctggccaacatggtgaaaccccatctccactaaacatacaaaattagctgggtgtggtggcacatgcctgtagtctcagctattctggaggctgatacaggagaattgcttgaaccctcccgggaggcagaggctgcggtgagccgagatggctctgctgcactccagcctgggcgaggcagagagactctgcctcaaaaaaagaaaaataataataataaataggagatgaataaattgggataaagtgtttttgaaggacagtctaggatataaaatgaactggttgtttgactaaaaatactacaaatgtttctttcaaattacatttcttttttgtctattggaaggtaggcactgatttctatgtctttctattccctaatagaacctactgttgacctctcagtcaatatttaatggatgatatagaactagtgaaaaaccatgcaatttaactagaaaaaaaaagtataatctattttcttttcctttttctttctttctttctttctttttttttttttttttgagacggtatcttgctctgtcacctaggctggagtgcagtggtgtgatctcggctcactgcaacctctgccttccaggttcaagtgattctctttctcagcccccagagtagctgggactaggagcgtgccccaccacacctggctaatttttctatttttattagagacagggtttcaccatgttggccaggctgatctcgtactcctggtctcaggtgatctgcctgcccgggtctcccaaagtgctgggattacaggcatgagccactgcacctggtctaatctattttcaatgtataagagaaaaatagtgttaagtgtcttggtgatggtgatgatggtaggagtaatggtgtgttttccttacatttaatttctacaggctatggcaattgccctataaaagccacccattttaagcacaaaagtgaatggtttttagtaaacttatatgggatcatatatttttaattgaaatattttttgagttaattatagattcatatgccattgtatgaaataatacagagagattccacgtatacttgctcaatttcccccagtggcaacactttgcaaaactataatatcatatcacatcacatgcaaaactataatatcatatcacaaccatgatactgacattgatgtggcctactaatcttattcagatgtcctcagtttaacttgtactcatttgtgtgtgttttgttttataccatttagtcacatgatcacatatttttaaacctttttttctcaaaacagagaagtttagcacaaaagtttagcaatttatcaatcttgtgattgtgctgttatgccatattaaaatgtgtgtcagaatgtaagtttttgttttcttaaaagtcctttttttgatagaatggcctttatgttaaaaatattttaagttgttttgtgacagtgtaagtcgatgtcatttaattctcatcacaaccctagagataggtattattcttatccctatttatgagtgaggaaactgaagcccagtgaggttaaataacttccttaagttcatacagcctatacatggcttaggcttagccagcatttgagttaagcagtctgtctctagtgccaaatcttttaatcactatattatacttcatcattatcattgatagctgtaaaagtgtataatgtggactatgtagagaaagtcataaaaggagatttaaaatgcatacagttgttcacatgaaaacttgtagccaaatgttcattacagcattattaataatggtaaaaaatggaaacaacccagatgtctatcatgtcatgagtgaataaacaaattgtggtatatccatacagtgaaatattattaagtagtataaaggaatggattattgataaatgctgtcacataggtgaatctgagaggcacaagaaaggccacatatgatatgctttcaattttaagtaacgtccagaataggcaaatctaaggagacagaaagttggctagttattactaggggctagggatgggagggaggtgactcctaataagtatgagatttcttttggtgatgatgaaaatgttctataattagatagtaatgattgcccaactctttgaatatgctgaaacccactgaattatatgctttaaaaggatgaatttattgtatgtgaattatatttcaaaaagctgttgttataaaaatgaatgtagttgagttatttggtttattttatgtcagaaaatgtcttacatctcatgcaaaagaaatgcaggaactatttggattgaatgaggctaagcatatctttctaggaagatggcatcaaggagttttattatgcctgtaatcctggcactttgggaggccaaggcgggagaccagaagtttgagattagtctgggcaacatcctcttatagatgagaaggatacttaatcactcaaaagttggcattgtgttttgtgataacaatagcctttagagctcatatgggaagattcaatagatagtgataggttatatgacttggtaaagagggcttaatgtataggtgcaagaaactttctcagatgtctttagttacctagccattcagttcaggagatgtaacccaagtgttaaaaggaatgtgactgggtgcggtggctcacacctgtaatcccagcactttgcgaggcggaagtgggtgggtctcttgagctcaggagttggagacaagcctgggcaacatggcaaaaccccatccctacaaaaaatgcacaaattagctgggtgtggtggcacatccctgtagttccaggtacttgtggggctgaggcgggaggatggctcgagcctgggaagttgaggctgcagtgagccatgttggtgcccccacacttcagcctgggtgacaaaatgagaccctctctctcaaaaaaaaactataaaaattgctgttcttgtttaaattactacaaagtgcagtttaatctagaaataataacaaattactagatttggggggttattaatgtcttatctatgtgaaaacagaagggcaatgcagggcagagaataaacttcaaaactttgagtttgttaactgtttatatctccacttgtcatgtttcagattttaaagttaaaatgacaaagtatctcatagggtttaaacaagtgactcttttcctgttaactgatactgtggcatgttgaagatgtaaaataaggttgaaaaggaaattgctttgcagcagtcttcataatgccaggacaaagtgagaaacagggtcagaatgatgatggctctccatctttgctacacatggctgcaagtatttacaaataccagcagaacttctacaaaccacttacaggtaaaatgagtgcagatttttaacactagtccctatggaactatgacttgtagttttggacacacagggtgaattacttggggttgattgtatttgaatttctaaccttatgtaattctagataccagacattcttgttgtgcaatgcttctctccctttttattctcatgagaatgctgggttgcagccggttggatcccataccttgggaccatgactgataactggagtggagaaaattcactgatctggaaaggttgagctttagggttcagagacttatttaaggtacacatgtgattgtacccaataaggaagtatattggctttatataattgttatgatcacttgttcaatgagtaactatagaattttactttttaagagtatgatcatagcatctacttgtaggtttgttgagtatgtttgacaagcccaagatagatgctcatgttagacccattaagaagttggtgtagtgatggttatggaaagcagtaagatagaatttaggttctgttctccttactggagaaatgactagcttacttgtcttcactctctcttgtttctctcaaaactttgtgaaccacctcagctgactataaatttttgtactagtatctccataattttaaaaaagttgttcacaagtttgagtgtagtacttcatctttgctttttaatgcacttccaaaaaatgtaaatctgttctcgcatattaggaacattttgatttgttgtttatttttagctttgctttttataagtaatttatacagaaggtacaccatattcaaaagaagaaaaatgggctgtgaatttttgctgatgtactactctcttcaaagggaattgcctatgttcaggcatagaaatgcaggcagtctgacatttaggtatgccatacagagtattgatatttttaatttgctacttttaacattttgagatttgtcacagtttgttctgtgggtgggtaaaagtaatggtaattttaattacagttgtcgtgcctcattagccattgctaaaacctgccttaccaaatcacttattttcttgatgcagtgttaaatctagcttctatgtccaggttatacattaatgagaacattcacccatctctcaaatgggttattatagtattttctcctgaaatagatgatgcataaaaaaaagtaaaaaagcttcaatagggataatgaaagccagataacatagcatggtatatgagttattcctcccgtttttcttacctgtctgcactaagaagggcacccattaaataccataattattagttgtgctgcctctgaagtagagcaccagaatgtgagagtaatacaatgagaccacacccagattctatccataacatactgtcctggtcttattaatttttttaacctgtttgttcttttagcacttttcctgcttttgtttgaagtctcttgctttgaagttatagaatttttatatttgccattggctgtaaagttatctcagctcttttataacttttcattatatttgcattaaaaggatcactttgagcaccctgtaattaattcagatgattattagcttttttgtttgttctactgtgcactctcctatatacattataacagaagaaaaaaccatttctacaaatacagtgtctgatagttcatcaaatcagaatgagcatcttaaaaagtgaattattaaaatattaattcatttacattcctattttaatgtaccaaatgtaactgatgaaaagaagaataccataaatgggtacctttcaaaaatgaaggaaaaaaaaatctcacaactaaagattcttaccatataaattatttattttagtaaataattattttagtacaaacagatacattttagcaggaaaaaacacactttaaaccttgttttatagattttatctttcttccaatctagccactgaaatggttttttctccagtgaagttatattatctacataagttgaatttaaaacaaggttgtattttaattttgcagttgtctgccacattacgcttgtggaaaaacactggcagaaagcaaagctaatagacattttgctgttggctcaccttattaatggctaagatttaattatgtatttctactgaaaagcaaacttgaaaaagacgtttggttactaactgtgggaactaaaaatttttatttatttttattttttattttttggtagagtctcactctcttgcccaggctggagtgcagtggcatgatcttggctcactgcagcctcctccttctgggttcaagcgattctcctgtctcagcctcccgagtagctgggattataggcaccagccaccatgcctggctaatttttgcatttttagtagaaacagcgtttcgccatgtaggctaggctggtctcgaactcctgacctctagtgatccacccccttctgcttcctaaagtgctgggattacaggcatgagccatcggcctggccaacttatttactgttacaacttacttactttgaaacaacttatttactgttaaaaaatgtggttcttatttcaaataagattttatggacatcaactaattttttaaacatatattgtaattttaaaacatttttaccaacatttttcaagagcatgggaaatctagggtatggcattttaaagtgactttaaagacacttcttgggttttgttgaagtcagaatatttttaaaaatacaatgagtttaatttactactgacagattttctttaattttttttgcattgttataattagtcatgccttaatcctcggggtttttgggaaactatatttaggggttaaaaacttagttattgacattgtaatttttctcagtattggtaagaattcaggtgtttaaggaatggagtttacttgttttctgttcacaaacccattgtaaaagatataatgaatgtagatgaaggtgaaatccgagataggaagagaggtaaaatgctacttttttttccttcacccaaggaaagccattgaatactgaatgggtcatgttgtaatttaattgggtgtaaattataactttgtaaatcatttgcctacttagtgtatatctctggtttttatgtaattcatctcccataatatctcagtttacactgaagtaaataagcaagcaggaataagtcctgcaaatagaggaagtagaaagtgcattcagaatgcattgctgaaattgtaaaactgatcctaaattgaattaggtagagcagttaatttagattacaagaaatgcaacaggaaaaaaatattacagttcttcctcttttttggaaaaaaaaaaagaaagaaaagacaaataaatcacccttagttagtgataattccttgacatctgtatgctcatttttagggccaaaaaatagtaggcttctctttggaaattgtagacgctttctctccttccagttacacgcggtcacatcaacatttgacacgtgggtaccgtgcacgtggcagcagtatttacaaacaccatcctaggattccagagactcttatgtaacagtggagagagtaagctttgagtgtctgtgggcggaggaatcaacacagtttaattcattgtccgggagcccttgtctggctctgatagggtcatgaaccaaagatcaaggtgtttaggtcaggatattccctaacgcatggttttcctaccaaagcctcaaaagctgtgcctaaatacaagattaatctttttctttctttctttcttttttttttttttttttgagacggagtttcgctcttgctgccaaggttggagtgcagtggcgccgcgatctcggctcactgcaacctccgcctcaccggttcaagcgattctccagcctcagacacccaagtagctgggattataggcatgcgccaccacgcccggctaattttgtatttttagtacagacggggtttctccatgttggtcagcctggtgttgaactcccgacttaaggtgatccgcttgcttcggccccccaaagtgctgggattacaggcttgagccaccgcgcccagctaagattaatctttttatgccctgcagcaaacaactagtcatgccaaaccatttttgtgatttggggaaacatgagcagatgatgctttggatctgattataattcacagtgctcttgtaatttacgtgagatttgcatacctgcctcccagcctcacaaaatgcctttaaaaaattacatcttggccaggatggctcacgcctgtaatcccggcattttgggaggccaaggcgggtggcaagagatcgagatcatcctggccaacacggtgaaaacccgtctctgctaaaaatacaaaaattagctgggcgtggtggcgggcgcctgtaatcccagctacttgggagactgtggcaggagaatcgcttgaccccgggaggcggaggttgcagtgagccgagatcgcgccactgcactccagcctggcgacagaacgagactccgtctcagaaaaaaaaaaaatcttgatatttgtatgcatcttaaaaagcaagagaattcatgattgacttcccaaactaaacggtctgaccagaaaacactcaagaaaactcttggttaatcatgctccttagtataccattatacctgcctctcccctttccccatcctctgtaaattctctcaaccttctctcatttttaatttcataccaagacctagagctaaaacaacaacaacaaagctttaagtctctatatttagggaatgtgcctcctatcccaaattgatttttagagcttttcatttatttttatcaatacaaagcaagttgaaataaaaaaaaaggcatcaaaaatttaaatgtctaaccacgtatatttggtatatgtatactggtgctatgtattagctgtaagcagactggtttgaatatttaaaatatgaacagaatttgagttctttttgtattgcatctaaggatcatttgagatggatgtcatcatttatcatccaaaatagaagccttcttgcctaacaaagaattgtaattagatcatcaaagatgaaatttatagtaattgaaaagttagctcatttgactgcttctttcatagactgtgtttttgtaattacactacctttctaaagataggaaaaatcagagtctctgaaatgtaatactataagtgaaatatgtattttttaaaataaaggatcttttcccaagagctaaaccaagcaccaaatctgttttttgggggttttttggtttgttggtttgtttgtttgtttgtttttgacagagtctccctctgtcgcccaggctggagtgaagcggagcgatctgggctcaccgcaacctccgcctcctgggttccagcaattctctgcctcaggcttcggagtagctgggattacaggcactcgccaccacgcccggctaatttttgtatttttagtagaggcggggttttaccatcttggtcaggctggttttgaactcctgacctggtgatccactcgcctcagcctcccaaagtgctgggattacaggtgtttttctttaagtaatacttggtataagagaactttatatctggaataatttaaatattatctgaccgaatctattattcacatatagaaactcaggttttagccatttaacatctaaagctgttctcatttagaggaaattaccaaaagagtgacttatttaactaacaataaaatctaaggatagatattttttcattctgttgcagagcaaaagcagccttctggatatgaaaagatattacttctttagtgtttattacttataatttattgtacatttctgatacactgaattaagatgcgatgagagtaggttgtagatttttaaaagttcttatttgcgtgatttatctacttgcttttttagtgtcggactataaatgatgtatttctctcaattatcctcggcctaaatagtaaaagcttgggtgaaattacttatgagtatacttttcctgcacagagcagagccattactgaacactctcgagctttaacaaaaatcatcctatcttatattagaatattaatattttccctctttctcggacctttgtttcacagtaaatcatatatggatataagctgcaagtgctcagaatttgattaaggctataagttaatttctactaaaaaagggattcaaatagaactttcatttggctgtactgtagtttcacttgaaggggcaagcatgcaataaacattgacttattcaatgcataggctgtcttcataaagatgagactgagtgacagttgtctgtgtattataaaatatcagaatggtagattgaatctgatgcataccaaggagcaatgtggaaattttaggctgttcgtcttttttcagttactactaagtgtgtgtatgtggtgtgtatgtgttttgaacttttcatatttaagctgaatcctctttggtagaaatggttaaatagactatagtaaaagtttctgtctataaatataaaatgaaaaaatactgatatcttgcattttccctaatatgttgaaagtgcacagaatccttggggtcttttgtataaactgtttttatatggttcctgtagaagacagctgaggcaccaaacacacacacaaaacaaacagcttgcttggtgatgataacattcgtgcaagggagttctctcttgcataggagtcccaggttaccctaatgccttcccacatggtcaaacacatggagctttcatatttacacacagctccagaattctgaagcctgcagttgtttatcagtgggatacagggagaaagagtggtgtctatcttactaactgtttaatgacctggatcatgaatactgatacagaataagaaagcactggcctgactgcaggggaaacatggtagatgcctaaaggaggcttttccctgccccacactgtttattttaaactatcattatcacctgaaaggagcttttcactttgaacttaaaatagtagcttttaaccctgacaagcaagtaggcactttagtattcaagaactgaaggtgacaagccctgaggagtgttactctctttcataaccaagctgactcaaactcttttagaagctagtgtagtaacttaaccatctctaataatgttgctgcatgccttcatagaaacagttggagcaagagctgcattttcttttttttaagtgtttattatttacattttatttttgaaaacatgccattcctattacatatagaaatacttcccaaaatcactgtttgtatagaactattttgcttaacattaggattctattgaagagcctatatctgcaataatacggggagaaaatccccttttgtgtgatagattaatgataaagagaaagaaaaggtgagaagtaattttgggaaatatgcaatgataaactagtggtatttattgaactaaacaccagcagctgtgcttagcatggataattgcctaaaaggatgagaaaaaaaagtaaaaatcaggagactataaatttttcagtgaagaataaattttctgtcacaaattatgaacattttaaatatgtattttaaactttttcctacttgtaacaaattatcagactttttaatctaccttttttgagcttttcatctttttccctgaattatagatttaattctgtgtatgtatgtgtgtgtttgaatatatttttatattttagatctagatttgtaaactagagctgtttctaactgcttataagacattgccacctggattgccaccactttcactccagtatttcaataaacacttcatcaaaaacatagtttattttcaaacatagaatcatggattgctacaagctgaaaggactttagagactcagtaaccccattccttgcatttacagatgagaaaatggaggcatgggaaagtaaagtcagttgcctcaaatagcgtaacaagctatgtatatttctaataatagctactattgattaagttcttatgttgggttaagtaccatgctaagcactttccaaagattatctaattcttatgtcatctatatttttgttggtgctattactctcctcactttactaaggaagaaaccaagacatggggttaaataacttccctataaattttgaattatctttggcatcatctccctatttgcaaatctccattgtctctttgttcgtaatcaatgtaaatcaactcttaaacagttggatgccaacaagcagtctggtgtttggagctcgaaagtttcgagagagagagagagagagagagagagagagagagagagagagagagagtgtgtgtgtgtgtgtgtgtgtgtgtgtgtgtgttccagctttgttgaggtataattgacaagtaaacagtccacaaaactgtacacatttaagagatacagtgtgatgttttaatatacattgtgaagtgattattactatcaggctaattcacatgtccatcacctctcagtcattttttgtgtttacggtgagaacacttaagagctactcaaatgtagtcaaggataccatacagtactaactgtagtcaccatgctgtacattagatctccagaatgtattaaatattcatctggcataactgaaactgtgtatcctttgacaaacctatttcccctactacccagcccatggcaaccaccatgttactctctgcgtttatgagttcgacttctttagattccacatataagtgagatcatgcaataggaagatctaatttagcatcctgactttcctttttattagctgtgtatgtcatattcaggttgccttagcatttgtgaatctgcttctctacctgtaaaatgagaacaactaataattcttatctcatggattactgagaggatcagatgaagtaacataaataaaacatccagcatgttacttggcaaaattgtagtgattgaataaatatttgtttattcttcaagcatgtgttgagcatctatgtatcaggcaagaagagagccatcatctttacccttctggaatatacaggctcataggaaataatcaatgctttgatctttttttaaagcataatgagatgaaaattataggactcatagactggtcagttgaggaatttcccaggatgcttccagcctctgctcaaaaggtgtgaattcccagttgcctgaataggcgccagagttggcatagctttctcagtattgggacctgacagggagattgcacaagtgtaacagcacagcctctgaagattggctcaagggggaagagatgaaggattacttccatcccttttattgtttcaatcaagatatatattatgagctcatagtaccatcctttcatgatcatcctttattgtctttattagatacaatgaaaagatacaaatttgtccatagaaatattaaatgatagcaggcatgatttaaaaagtactaaggactatagatattactgtttttcctctattttgtatcatattttcaggaagaagagacaacattttggcataccttgcttaaagatagatgatagccgggtgtggtggctcagacctgtaattccagcactttgggaggccgaggcgggcagatcacctgaggtcaggagtttgaaaccaacctggccaacgtagagaaaccccgtctgtaccaaaaaatacaaaaattagccaggcgtggtggtgggcgcctgtaattccagccactcaggagactgaggcacgagaatcacttgaacccaggaggcagaggttgcagtgagctgagatcgtgccattgcactccagcctgggtgacagagggagacttcgtctcccaaaaaataaaaataaaaaataattgtcttggtgtgctaatcaggagcttcctgtgagagtggaaattccttacatggcagtgtcatgaaattttaggcccatgtgaaagatgtttttgagtgtctcaaaatagttaacggtttaaaaatacattatttatgtgtcagaaactgctttcattgaaattgaagtttctttgagaactaggatcatatcatgtatatctattgaatttcccacaacaattatcacgcaagcaaatgaatagcagaccctcaataacacttactgatgattattgccatgtataagttgggatactcttgagtacctttctaagtctgcatttagggaaatacagaacacaaaatgaaatgtttgattggttgcttagtttccacagtgacttttcaaaatgtataggagcatggtaacaaaactattttaaatactacaatcttaagtatgcctttattattcttacccacaataatgcattgctttaaaaaattgtttatcagtgtcagaccatacctttctgagtctctactatgtaagatgtgaaagttaatattcttcaattccagctacttttcttttcctgccttctgtcaactcctgtattccatatcattacttcttattgctaaatttataatatttatattctggtttgcatctatagttaattctcttgtgcttcatttctcagtgctaattgaaaaagaaaacacatcacttacaatgccatgattgtaataaataaaattcactgtaacacctagcagtatggttgaacatgtagaaaaggaaaaagtgatcctgtgacactaaaatttagcttgttctaaggatgctactttaagcattagggtaaaatggattcccttttgctaaattctttcagttcctcaaaattatgccacatttttgtttctttcacatttggacttagattttcctgtaagcattcaatttttcttgaaaattttaattgcatttttttattcttgttgacagaagaaacattttcatcatatcacaattttttttcagatttcttaattataccatttgatgaatgaaatacactttcttcttgaagtctgatttttctgttctaatttagagtttcttctcatttttctcctggctatgtctattattgctttagtctcatgtctttgtatttgattattatttttctttttactactgtttttcttcttacagaaaaaaaaagaaaaaaaaacaggggtttttacaaatattgtgctgagtctttacatgtccaaaatgccttatatttttccttatagtacattcataaattattgtgattagaaccataaattcaaagtaattttctctcagagcttgggaaacattggtacgttgttacccttcatctaggattgcttatgagatagatatctgatgccagtctgattctgtcttttttagataacttttttccctattcatatgtttattaggatctttatcttttcacttctgaaattcctccagatatggctctgttaaaatgtattcttctcagcacttgatgattctgtacaatctggaaacaactgcctttatttagcttaaggtacttttcttccattgtacctttgattatttcttccttctttttttcaccctatctttatgaaactcatgttaatggtgcattagaacttgtgaactgatttttcttatttattaaattccatcacatatttttcatctgtttatctctgtatattttattttctcaacttttgatatttttgttaattgaaatttaatttccaagaagtccattttctattctctgattgattctttttaatggtagcctatttcgtggctcaaatcatataaaatgtattaaattttgtgggaaaattaggcaaacaaagaaaattaaattttacctaactatatctaaaaacaatacaactaaacttaagaaaagtgcgtatatgtgtacacatatacatatgcgtgtatatgtgtacacatatgctacatatacatgtatatgtagtatatgtacatgtagtatatgtgtgtatgtatgtatatacacatgtagtatatctatatacatgtatatgtacaaagaaaaaatatgtatataatagtttcactgtactttatttgctccccttttaaaaataacagtgctagagttcatgactgactaattttcagaacttggtgtgtatggttgtttattaagccctcaataataatgctttagtattacagtgcccaggcatagtcagtgactgtgctaatagtcctagcagtagcagttcatcctgtacagatctaaggtgtaactattttcatttctgggcccttggagattctttggttgtcttcatatcttttacctatcttgctgttcaataacaggtaatagaaaaggagataaaacttaaatgtcatcatttcccactgcttaacagtctttaaaaataaatgtgaaacccgtaaggacgtaatcttgcctagctttaaggaatgaaggaaacactagaaacaacagagagaaaaggaataactgatcctccaacatgttctgttgactctacctgtaaagtatattcaggatctgactacttcacaccatttcaccaatttccatctccattcaaaccaccttcatgtgttactttgaaaagtgcagtttccctgtcatgggtttccctgtttctagctttgctcccccttcttacctcaccgtgggtttttacccaaacaaaaattcaagtgatcatttaaaaattaagtcaggtcatgcctctcctctgcttaaaaccattaatgggtctctgtttcactcagaatataagccaaagcccttttcatgacccaccagtcctcaagtgaattggctgctatttgtgtttctgattccatttcttgccactattctccctcattctattctaatttccttggttttcttgctgtcctggcaacaagaagagcatcctttttcctccaggcctttgcacttgctgttccctcttcctggagcacccttccttcagagagccacaggtattgtttctatctttccttctaatctctccttgagtgttactttttcagagataaattccctaaccattctatctaacagaactctgactattgaccttgctttattttctctctttttttttaaaattttatttttttattcccataggttattggggaacaggtggtatttggttacatgggtaagttctttagtggtgatttgtgagatcttggtgcacctatcacccgagcagtatacacttcaccctattcgtagtcttttattcctcacccccttcccacccttttcccctgagtccctagagtccattgtgtcattcttatgcctttgcatcctcatagcgtagctcccacttatgagtgagaacatatgatgtttggttttccatccctgagttacttcacttagaataatagtctccagtcttatccaggtcactgcaaatgccattaattcattcctttttatggctgagtagtattccatcttataaatataccacagtttctttaactactcaccgattgacgagcatttgggttggttccacatttttgcaattgcaaattgtgctgctataaatgtgtgtgcaagtatctttttcatataatgacttttttcctctgggtagatacccagtagtgggattgctggatcaaatggtagttgtacttttagttatttaaggaatctccacactgttttccatagtggctgtactagtttacattcccaccagcagtgtagaagtgttctctgttcaccatatccatgccaacgtctactattttttgattttttattgccgttcttgcaggagtaaagtattgcattgtggttttgatttgcatttccctgatcattagtgatattgaacattttctcatatgtttgttggtcatttgtatatcttctttttaaaattgtctattcatgtccttagcccactttttgataggattgtttgtttttttccttgctaatttgttggagttccttgtagattctagatattagtcctttgccggatgcatagattgtgaagattttctcccactctgtgggttgtctgtttacgctgctgactgttcctattgctgtgcagaggctcttttgtttaattaagtctcacctatttatctttgtttttgttgcatttgcttttgggttcttggtcatgaagtctttacctaagccaatgtctagaagggtttttctgatgttatcttctagaatttttatagtttcagcacgtagatttaagtttttgatccatcttgagttgatttttatataaggtgagagatgaggatctagtttcattcttctatatgtggcttaccagctatcccagcaccatttgttgaatagggtgtcctttacctactaatttatgtttttgtttgctttgtcaaaggtcagttggctgtaagtatgtgggtttctttcttggttctctatccccccattggtctctgtacctatttttataccagtaccatgctgttttggtgtctatggccttctagtataaagtcaggtaatgtgattctgcccaatttgttctttgtgcttagttttgctttggctctgtgggttcttttttgttttcatatgaattttaaaattgtttttcctaattctgtgaagaatgatggtggtattttgatgggaattgcatagtttatcaacccttggcaaagtgtttctgcttttcttaaacaatttttattgtctgctttctccagtagatgtgagttctatgagatgaggaacattgtttgggtcactgacatgtattgtcagcataccaaacagtggctagcacatggtgagcactcaataaatatttggtgaaagttgcagtgaatgaaaatggtttctaaaatggcaatgactatagtcccagctactctgaaggctgaggcaggaagattgcctgagtctcaaaagtttggggttgtagtgcactatgattgtgcctgtgaatagctgctgcattgtagcctggtcaacacagtgagaacccatctctttaaaaaaatggcaatgaaataatcttatttttactgcttttctctttaaggctgccagtgttgtcttttctctgctgatttatcctcattggaaattgaagatagataaaatatccattgattatttataggtgaaattaggcttttggatccatgaggaatagctgagacaatcttccaggagcttctggagccgaggaaacattggtcactaaaataccatttatattggcaactgtactcttttccgatgctagtgtttcaattacattgtgcatttaaaaggctgttgcggctacctcaaaatataaacatgatgtgcgacactacttgttagttttgaacaactgatttataaatagacttagggtgctcaagcctcctgcaagatgagcactgcctgtgttcttccttctgcttcctttatttcagctgtgtgtctaccaacttcctcctccttctacactaggagaaattgcactgtttccaatatctttaacatctgctatcatgatgagaaaatatcttttctggatttgaaataccttcttcattctttttttttaaatggcggaaataaattcatagtgttttgagtgcagttttcttcctgctgttattgctggctcaaaatccaggagcatttcagtgttatttctgagctccatgatgggagttccatttctgttttattcaaagtgttatctccagtgtctagcacagtgcctggcacattataagcctataatgtttatctagtggatgtagaccaatactattaaagaattatcattgcaaagatttagtggcatgaaaaaatgataatgattaatgctctactccatgctaaggaaatgaagtgcaaatcgttctttatttttcttccaagtatagagaactttctgaaattaaagaagcattgattaataagttttaatatatgttattgatcataataatatgtaatcatataaccaaataagataacacaggccatcttttgttctttaaaaaatgacaggaagattagaataagagaaaaaattagaggtcaaaacagttttcttcaaaccagtagtgtaacttactgagatatcttctgtaatccttaaattctgtattgatgctaccaagatgcaactcttgagctacaactgcctcttgataaaggatgctggtccctgctgccagtgtaatgtttgctcatttacagtggaatgtacaatatagtacctgggatggtgaagaaggtgaagcaacaaatttaaaatagctgtgggtaaacctacagaaacagactattctctttcttccagattgcattattcattttcatatgcctgcctttatctgctttggaagcctatttcctaatcttccaagatttatcatcaccttcatatgtccatagcatgcatttctcagacaggtaagatagaattggtatatatttggtatagcaaaaagtcaaggttgtctttagattatatccttggtttttcatgtggtactggggagaaagcctactgtttcttcatctataaaatgaaggacctgggcaagataacattctgtgaaatttcactgaactttgagctcagcaaagtagggatgcgtgtgtgtgtgtctatttgcaatgcatcacagaccttaaataaatacagttgacccttgaataacatggaggttaagagcaccaaccccctgcactgtcaaaaatccacatgtaatttttgactccccaaaaacttaactactaatagcctgctgttgtctggaggccctgctgataacacacacagttgactaacacatattttctatgatatgtattgtgtactatattcttacaataaactaagctagagaaaagaaactgttattaagaaaatcgtaaggtaaagaaaatatatttactatttattaaatggaagtagatcatcataaagatcttcatcctttgttgtcttcaccttgagtatgctgaagaagaggaggaaaaggatgggttggtcttgctgttccaggggtggcagaagtggaagaaaattcacatataagcagtccatgcagttcaaacctgtattttaaggtcaacggtatttgttacattgcattttgtaagtgaccttgttaatttttttcaatgaaaaaaatagtgttccattcaaatgcctgtatgtttatgagaaacatttcagaactatgaaagttgaattcaaggtttcttgcagattgtttgtatactttctgtaatgtttgtcatataatgagaatactaatggtcttacaacttgaaactgattaactgattaactctttaagcaacttaaaaagaaaatctttcagtgaggaaagagtattcatcagaagtattctagtagatgacatatttttggtaatgaaattgatatgggcaattaacagctttttccaagttggctatgctgctactctcttattatacaatgatactatttttcagagcagaaagcaaattagttttatttttataaaccaaattttaaatatccctttagagaatagaaaatatgaaaaagtatttgcttctcagacctctcaacaatataaattttcttcttaagaggaaatttattcttgcatgccaacacaaaggataaaaagtttacctatccttagtttctaagaggaaaatgtgcataaaatttccatctgctgtgtgccagttaccaaaacgataagttccaactcaatcttggttgggtgtggtggctcacgcctgtgatcccggcactttgggaggccgaggtgggcagatcacgagctcaggagtttgagaccagcctggccaatatggtgaaaacccgtctctactaaaaatacaaaaaaaaaaaaaaacaaaactagcccggcatggtggtgtgctcccgtagtcccagctacttgggaggctgaggcaggagaatcgattgaacccaggaggtggaggttgcagtgagccaagattgcaccactgcactccagcctgggcaaaagagggagactctctctcaaacaaacaaaaaagactcaatcttactaaaaaactgcagagaagaatgagtcattttagtcaataaaggaaataaagaaattctagttttgaaaatgacataatttgctacaagaatgcaaaggtgatgacatgaggaaaaaaggggtttgctgatttgttttctctactactcagcaaatgcaggccaggaacccatttattcaaatatttattacatggtaaattaaaacatttataaaattaggctcatattcttagaattcctgttaacaaagtgacatataaacaagattataatctaatggagattaatattggttgagaaaaatcttgagacttctttaagacttcagtttaataaaatattgacttaggtagatatatgtgaggaaatatatattttacccatgcatgcaaaaatgatgtatgtatttcttaaaagagtaggtagcaatgacttcaaaggaccatagctgtccctatcaacatatatattaacaaaacaattagaaacatgagcttagtatgctaattatatttctacccaaagcctcaatttgttctatagctatactgttcatatataagtaaaattttaggggtatcagagagagttagaaaagagcaaatacatgtatgaatttgataagcctatcccttaatttgatagatcttaaaagatattttatcactgcattcttctaaagaaatgtatttgtacattgcaaaacaaccctttttgagaagtagactatgatcacagattttcttgccactagtatttcctaagatttatttggaatagaagatcgatatttttctgggatgacatatggttaaaaagtaaaaaacaaaacaaaacaaaaaactctttaaaaacacaacaagtaaaaagctgaatgaattggaaaattaacgaatcttcttagatctgtcagaaaaatgagattatagggcaaaccactgcatcaaatattagagaagcagacaggtagatagaaagaatcacaacttagtggggcaaaaacctacaaggaaaatttttgtgggaaccggtgccaggtaggaaaacatgaactgtaattgaaaaattgttcagtgtgggcggttgttcagtgtggcaagtctgagggttaaaaactccaggaggactcacttacggaagggcctgtacttttgtgagtttaacctccaggagtgttcacagtgactactggagaaaattccctaaggggagaagaaaaggaaccatcttgaaatatgtcagagcattttgttggactcaagcctgctctcaagtgaaactattttaccagagcctaaacttttgggattttataagagtgtaacctcccaaagggaagggaaatacctaagttcagcccccttttagctttccacatagggaaaggaaaatatataactctggacaactcaaaccatcctgtccacgttagggggcctaggggaactgagaaaactggtgaagttcatagtccatgggtacagtttcaccaaagagggagaccaaattataaggctacagaatgcttccctttcccacaccttttactatcatattactaaaagcctatttgcagcagtttcttttactgagtatatcatgtctgtcattcaaccaaaaaattataaggcatgctaaaaggcaggaaatgcagtttgaagacactgaataagcatcagaagcagagtcaaatatggcagtgacattggaattatcagaccagaaactttataaaaaactatggttaatatggtgagggattaaaaaaatgacatacaagaacagatggataatgtaaatatagagacggaaattttaggaaagaaccaaagagaaatgccaagtatcaagcatagtgtacagaaatgattaaaatgtctttgataggctcataagtagattgaacatagccgaggaaaaaatctttgaagttaaggatatgataataggaacttcaaaactaaaatgcaaagagaaaaaagactgtgaaaaaaacagaagagattattcaagaactgcaggagaactacaaaaggtataatgtacgtgcaatgggcatactagaaaaagaaagaaaggattagatgcaatatttgaagaaatagtgtgtgaaaatctcccccaattaatgtcagacaccaaactacttctccagagagctcaaagaacaccaagcaggataaatgtcccaaaactactcatgggcatattatattcaaacttcagaaaatcaaagattaaaaaaatatcgaaagaatccagaaggaaaaaacacctatagaggagcaaaaataataaattttatctgacatatcctcataaaccatacaaataagagagtagagtgagacatttaagatgttgaaagaaaaatccggcagtgtacgattctggaccttgcaaaattgtccttcagaagttaagaaataaagtctgtcttaaagaaacaaaaatttcaggaatttgttgccagtggaccacccttgcaaaaaatgtttaaagttctttagagagaggtaaaatgatacaggttagaaactcagatccacataaggaaaataaaattagggatatagtagtattccccaacttgataaagaaaatacacaaaaaacctacagtttacatcatacttaatttttagaaactcaaagctttcctgctaagatcaagaacaagacaaaggtgtctcctcttaccactttgtttcctactggaagtgctacctaatgcaataagacaaaggaaagaaaatgaaaagcatacagattccggaggaagaaatcaaactgtctttgttcacggatgacagttgtttatatggaatatccaaaggatcagaaaaaagaaaactggaactaataaatgattattgtaaggttacagaatacaaacttaatataaagaaagccaatcactttcctgtataccagcaataaacaagtgtaatttgaattaaaaacacattaccatttacattagcaccccaagaaatgaaatacttttgtataaatctaacagaatatgtacatgatctatatgaagaaaactacaaaagtgtaatgaaaaataccagtgaactaaataatgaagagatgttacatgttcattgtcaagatgtcagttcttcccaacttgatctatagattcagtgcaatgccattaaaaaacacagcacgatattttatggatatcaacaaaaggattctaaagtttatatggagaggcaaaagagcagaatagccaactcagtatttgaggagaacaacaaagtcagaggactgacactacctggctttaaagcttactataaagctcagataatcaatgtagtgggtactggtgaaagaatattcaaatagaccaatggaatagaataaagagcccaaacaaacccatgtaaatataatcaaatgatctttgacaagggagcaaaggcaatacaatggagcaaagatggtcttttcaacaaataatgctggaaaaactacacattaacatacaacaacaaaaattttttaaatccaaattgagtgtaaacacagatcttataccctttgcaaaaattaacttgaatcatagacctaaatgtaaaatgcagaactataaaactcccagaagataacacaggaaaaatcctagatgactttggtatggcagtggcattttttagatacagctccaaaggcacgatacatgaaggaaatgattgacaagctggacttaactaaaatttaaaacttctgctctgtgaaagacaatattaagagaatgagaagacaagccacagatggaaaaattatttgcaaaagatacttctcataaaggactattgttcacaatgtgcaaacaactcttacaactcaacagtttgaaaatgaacaactcaacttaaaaaatgagcaaaaaacctgaacagacaactcaccaaagaagatacacaagtgtcaagaaagcataggaaaagatgttaaacatcatagtcattagggtattgaaaattaaaacaacaatgagataccgctacatacctgttagaatggctgaagtcagaacactgatgaaaccaagtgctggtgagaatgtggagcaacaggaaccttcattcattgctggtaagaattcaaaatggcatagtcactttggaagacagtttggcagtttcttacaaaataaacatactcttcccatatgattcagcaatagcgctccttggtatggacttgaaaacttatgtcctggccgggcacagtagctcacgcctgtaattgcagcactttgggaggcccaggcaggtggatcatttgaggtcaggagttcaagaccagcctggtgaaatcccatggtgaaaccccagctctactaaagatacaaaaaagtagctgggtgtggcagtgtgcgcctgtaatctcagctactagggaggctgaggcaggagaatcacttgagcccaggaggcggaggttgcagtgagctgagatcatgccattgcactccagcctgagtgacagagcaaaactccatctcaaaaaaaaaagcaaaaacaaaaacaaacaaacaaaacttatctccacataaaaacctgcacacattgtttaacagctttacataattgccaaaacttgggtgcaatcaagatatcctttaatatttgagtggataaactgtggtacatccagatgtaagaatattattcagcactaagaaatgagctatcacatcataaaacgacatggatgaaacttaaatgcatattataaagtgaaagaagctaatccgaaaaggctaaatactgtatgattccaactatatgacattccggaaaagccaaaattatggagacagtaaaaagagcagtgttttccagagggaggaatgtataggcaaatttttagtgcagtgaaatgaatctatgtaatactatagtggtggatccatgtcattatacatttgtccaaacacgtaggatgtaaccaccaatagtgaaccctaatgtaaactatggggtttgggtatcaaaatgcatcaatgtaggtttatcagttgtaacaaatataccactctggtatgggatgttgataatggggaaggttgtgggtctgtggggacaggggtatatgggaactttctactgttttactgtgaatcaattttactgtaaagtttattaatgttaaaaaatttaatgcacatgtaccctaaaacttaaagtataataataataaaataaatttaggcaatctgaaaaaatgttaataaaaaagaaaataaactagttgaatgtatcagttcattttcatactgctataaagtactgcctgagactgagtaatttataaaggaaagagatttaattgactcacagtttagcatggctggggaggtctcaggaaacttaacagtcatggcaggtgacttcacaaagtggcaggaaggagaaatgaacgcagaagcaactaccaaacacttataaaaccatcagatctcatgagaactcactccctatgatgagaacagcatgggggcaactgcccccatgatccaattacttccacctggtctctgccttgacacatgggtattatggagattatggggattataattcaagatgagatttgggtggggacacaaagcctaaccatatcagtgataaaactatgtcttttcttttatggggtgctatagtgtttcatttcaagttgtctttttgacctccattttccaatttctggttaggaaaaataactttgtctcctccttaattgacccacaaccttgtttgcaatgaagaatcaacacaaatctttcattaaaagaaataggggaggtgatgggggatatccatgagtgtccatgggcataattcagttgccttcattcaatgccaatgatactgcaaagcctacaaggcaaattcatgtacctacagacagactccatcctttttctcaaactattcaagataaaaaatcttgtttcattttatgtgaggatttttttcaccatctatcctcaaaaaatgaaaaatatcctcttcatttgggaaatgagtgcttataatagaaagtaatttgtagtcagctgttacacttagatgatttgtgtcacctctgacctgctttctgataatgcatgacttcattcatggctctctaggtgacctgtgtaccctgacctggcataaaccactagagtattaagtcatttcagtggcacatgtttgagggaagattgacatcccactggaagactatctacagtgagatcctctaaagcagctgcattcctagtgaggcatgattaagtttatcccactattaggttctggagtattacttgtcatgcccaagaggaaagtttttctagcatgcagagtatctggtttttaatggctactgagctgaaataaaatgtgcctactaagggttgttcatttgtctgtctcccttctttcactgttttttttcttggaggttacagtagttatgcctttctggtcagctggctgttgacctatcatagaaatgacactttcacatcttcaagtgtaaggaattagatgttccagccttcactttgtttctcatccaaaatcaatgacaaaactttcagtattgatttctcatggcctatgaacctgagtcaacttggcataaaggacttttcagacaagcttctctaaatgcagagtcagtggcttctttttgccaaactccactttgctcagtgataacattaaaatggtgatttgattcattcctagtctaaaaatacttcctcatattccaaaatctcagtcattaatacatggaggaaaatacaaattattacatgcctgtgcttctcggctgttgtagatagataaaatatatacaattgtgttctataattattgagttcttttaagttttatctttttttgttttaccaggaagcaaaattatgtttatttcagagcttatttactgcatttagaatctcatgacacttaaaaaacctttctaaaacgtaaatattctccatgatctccatggtcacaaacagtatttcacgttctaattgatattgccattttatcatttttttttttttcttggagacagtctcactctgttgcccaggctgggatgcagaagcacgatcttgcctcactgcaacctccacctcctgagttcaagcgattctcctgcctcagcctgccgggtagctagaattacaggcatgtgccaccacacctggctaattctgtatttttagtagagacagggtttcacgatgttggccagactggtcttgaactcctgacctcaggtgatccacccaccgcagcctcccaaagtgctggaattacaggcgtgaggcactgcatctggcccttttatctttcttttaactcaaatcctcaaatatatccctccatgtgaagttgccttccctaattatgtactgtcctagtttaatcttcattccttgtttgcctctataaaaccaagtttaaaaatagtctctgattctgtaaatcatcactcttatgctcatttatatttctatctagaatattttaaatcctttgtaacaaagtttctactatgcagtctacctttctcagctacgatctatatactccttggccatgtcttttgttattgtgtgtgtttgtctttgtgtgtgtctgtatagtagtggtttgtaaattctccatttagtcacaatatgctttttgaggattttccttttcctgggaatttcttgatgatttttattttgtcatgtgatgaagaatgtatgtcaaagcaccactgcagaaatagtgcttttctatttacttgcactcttccatcttagaagagctggtgatagacaaccgactcttcttttatcttggtttctacaacacagaggttgctaagcgactttaatcccttttaacacaggacaatcaacaacaaattccttctttctttagattcagatatttcacttagaaaatctagcaaataaaaaatggtttaaaacttctttaaaatgtgtaattctgtacaatctcctacatctgtaacccctgccccaaatattttttacttatgctatttcttgagcattatgatatgcttattcataggcaatcaacttgtaagtagcaatagtgtagccccttctaggaaatcgaagatgtgaaaatccagtttaatgtgataatgagttactttgatgaaaaatactatgtcacaatttgttataaaaatactcatttggatttctgattcacttatattaccctccaaccttaagtatgattgaatttatagctttttatactactttctttatttagggaggagtgtatttaaattctgttatctcggttattacttgaaagttcaacctcatactttcatttttatataattttaatattatgaaaatattttatgtaattttatgtataattcgaaaacatttttaaatattgcatctttaaatttttatttcttttatcaaattttccctatcatttgttctctggctacaaccaaagttaatagttacatttttttccagtgacaaatggtaatttgcaaagacttgtaacagttgcttaatacttttttatcccttatttaagaatcatgcaaacaaccagagctgataggcagcaggtgcacatgagtgtggctgtgctgatggttactgaaagatttccaaggtagctagtaattctgctaccctaagccactatagctccttccccattactccctgggtctacccaccatcctgcagctagaataataaatggcatgtaggttcctctaggatcctcctccagcactatgtctcatgcctggacatatgagctgttaaatattttgattatcactcctgtgtggtaagggagacgtctacttgtcgtaacttgatgtttactaaactacttttaagattaccttatgataaaagtagacacttgcaattttgcagaatgcatagtttgtttttaacaaaccaggtaaacataactgcagagttttcctatacgttttgaaatctttaaaaaagtattttttatttgcctttctattagaaatagattagataaaaatttccttgtttcaatttttagaatgaacattagagaatattgttactgaaggaatttttttaaaaatagtgactgatcaaatgtcagcagctttatactatagtgtaaaattttattttgtagtttgccatcccattaagcattagaatttttataattgatcctttgatgtttatattcatgatattaatgtaatgtctttaaaccttagctcatataggtcatatgacttaaagcatccttagatgaagatatttgggctataaataatttatgacataagtgatttaaaaattcattctttccatccattttgaagaaattgtaaggtagggttcatgtatacctaatacttatccccccaaaatacgaaaaataaaatcatttttaaaatatctgggttaatgctatagattggaagcagtttttaaaaagcacttaaagtctaccagtttattgatcctcaatctgtggctgttttaaatggatgcaattagcagttcagtctaagagaaccatggtagtagactcattactccccagaaaccattacatcattttgtaatattaaattactaaatataaggaatagaatatatattgtaaaaattgctttggaatcaataataagtattgtggctatcaattatagttatatattacaatgtaagggatatccttttataaacttaatatcacacaagtagacttagaataattccattaatataattttgcttgtgtttttatacctattcatttcaataactctttttcctatatatattttttatctcaaattcgatagtatctaaatcatggaatcataaaaccttaaagctgggttggaacagaaataatacaatttaacatcttataggctctctagtcctcagtttccctaagtgatcggctcaagatcatgaatttatggaggattagagtcagaattagaacccaagattaatttatactttgttatctcttctacagcctacccccttagtttgcctgtgggtttatggaagttacaggagagacattctgagattcagctaaaaacctagctcccaatagaattattgccctgtagtcagccgcgcaaatacaatcacaaatacctgaagttccttgtgtgaagaaaaagaaaatgactattaaagcatcaaaatcaatgcaagttacctttctttgcccctttcttcccctttcactcctttcttctcctatactacttgaaatttctagcggggatctctaaaatgcctggatgttaggaatggtaagtctattgtagagaattatattttctattttagtggatgaaaaataaaccatacccttaagaggcttttcaaagttaagattttgagcacatccttcattggcccagtctctgaccagtgaggtcaagtattagccagtgtcagaatgtcgtgaaaagtttgtgtttcagatgcagaatttttttttgcattttctgtgtgatgtttatagggtattttcttctgaaatgttttccatcttggtttttaaaaatatctattattttaaaaaatattccctcataacttctttttattttcggaaactatataaattgatctgataatctatacacaatgccttgtgaatttatacctgtacctctcatgttccagtgtttggttcttaaataatcactttgtataatggaaatactatgttaaattgtttataactggtggttgatatttcagccttgtttggctatcgtagttatataaagactgttaattagaaacaacctcatatggtgtatgcttgtttttatcttcatggaatttgttctgcaaacactgagttctttactgggagtcaccactttgtctatgttaggaggagcaggaagtgaatacatttaaggtctttaattttcttcttaaaactttgactactgtagtggttttttaaagcattaacaggagaatagccatcactgccaagtagctgacattctgaaatagcacttccctttaggcactgtacagttggaatcatttacttgcagagaggtgtgtgtgtgtgtgtgtgtatttatgtgtgtactcatgtgtataagaataggagaaacactttgtgggcatatcctgctgaggtgagtaacgtgctgattagtgaactccagtctcatcccatttaaacctggaggagaaccacatcaagcacagaagcagccaaagcagcatttcaacaggaaggaaacatctattactggggctttgaagaaacatgccatgaaggtgtactaatatcacaaagggaagggaaggactaaattcagcatgataaacaaagtcccttttttgtaacggaagtgtttgatgatgtttgatcaatggtggatctatctcttgaaaggaaaatgcatttaaaccccaaatggaggattcttatataaggtgcctagcttgtaatgatatattcatgtttataggtagagtgactggtttttagagaagaggtttttttttttccttcatttttgaacgaaaacttgtctgtctctaggctttgaaatgtagaattatttacctttccccaaaatgaaatgtttcactgaatctcctacaagcttgtggaggccatgaagcatgttgaataagagcacaggctctggaggccctgccacccacaaagggtgtgctaaggtaaacaactgatagtattttgaaaattagatgacttagaatccattcaataaattttagctatttttattgtcttttttttctaaatctatttggaaaatattgcagataaagtagataatacctttctaaaacacagtgagaccaggcgcagtggctcatgcctgtaatcccagcactttcggaggccgaggtatgcggatcacgaggtcaggagatcgagaccatcctggctaacacggtgaaatcccgtctctactaaaaatacaaaaattagccaggcgtgggggcatgcgcctgtaatcccagctactcaggaggctgaggcaggagaatggcgtgaaccggggaggcggagcttgcagtgagccaagatcgcaccactgcactccagcctgggctacagagcaagactctgtctctaaaaaataaaaaataaaaatagaacagtgaatagtttataaagataaaatagaataggcttcaatttagggaacaaaggaaaatatgtttaggaatgatattatgctcaaaatgattgcaactttgatggtgaagtgtattttattcaattaaaaatgtagatatggctgggcgtggtggctcacacctgtaatcccagcactttggaaggttgacgcaggtggatcacttgaggttaggagtttgagacctgcctgggcaacatagtgagacctcatctctacaaaaaataaacaaaaaatgtgctgggtgtggtggtacatgcctgtagtcctagccacttgggagactgagatggaaggatagcttgagtctgggaggtcagtgctgcagtgagccgagatcgtgccactgcacttgagcctgggtgacagagcaagaccctgtctcaagaaaacaaacaaaaaaacaaaaacaacagtagatatgtgtgtgggaatgagaacatttaaatgtgctcatcggcttagatttttctttaacccccttcatggcccttatcttaacctctgtcttcagcactacccttcatatgtttgttccgttttatcttctaagtgatttttttataactctcaatgtatcatggcagaaggaaaactcagtgtataagctgactgtattttgcattttcttttttttttttttttttttgagatggagtctcactctgtcacccaggctggagtgcagtggtgcgatctcagcttattgcaacctccgcctcctggaggcgattctcccgcctcagcctccccagtagctgggactacaggcttgcaccaccatgcctggataatttttatatttttagtagagacggggtttcatcatgttgtctaggcaggtctcaaactcctgacctcaagtgatccacccaccttggcctcccaaagtgctgggattgcaggcatgagccaccgcggcctggcttcatgatccaaaatagcatcattaagcttctctttcaaaacatgtatataagcctgtgagtcatcactgtatttatcagaatattatcatattggagactttgcaaagctgaacaaagccagaattattggctactgaggaactatattctagcaagagactattctatttgttggggatcacctctttttactaaaggggactgttttgggcatataaaactagaattcatggtttctccttgatagtttgccagcttgattcccagtcaaccagataactgctggtagtgacactcatgtcctccaggactcccaatcttgtgccagctcagagagggaaatccccctagaactgctcacaccattccaagaaccacaagcaccaccttggtatagttaaaaatgtgataccaactcaaattctgataaaaacaagttctataaagcttaataaagttatattttttactttttaagttttgttttactattttaaacagaaaacagaaggtaaaaactcctctgccttcctcagtatttggtttgtcagttgctgaactcagatttaagagtctaatcatatacaggcaataaccctcttctaatcttaataatgtttctttgatcatttctttaaaaagaaaaatgaaatagcctattgactccaaccctgacctcctgtacttcacctgcctgatgaatatttatttggaatacataagttttttcaaatgcatcatgtcaagaatttgtcatttcagattcctttctagaattatctatttatctcattagtagcatcattctttcagacaaccaaactcaaaagctttatcactataattgaatttcttttttcttcttacatttaaaatgttactaaatgccattcatttctttatcagtaatatttctgtttgatcattttatttcatttattctgccaccctctcattccaactattgcttatacttgagtactgcaataagccaatatcttgcatatgattatttataacacctaaatcttctaccacttcacactcactgggatggatataatttttaaaacatacaataacaggtgttagtgcggatatggaaaaattggaaccctgacacattgctagtggaatgtaaaaaggtgcagccactttgcaaaacagtttggcagttcatcaaaagattaagcatggaactaccataagacccagtagtttcgctcttagggattccactctcaagagaattgaaaacatatgcccatacaaaaacttataaacattgtatatccatgtttgttgcagcattattcacaatagcctaaaggtagaagcaacccaaatgcctacagatggatgaatggataaacagaatgtggtatagacatacaatggactattattcaaccttaaagaggaagaaaattctgacacatgctagaaaataaatggatcttgtatacattctactaagtggaataagccaatcacacaaagaaaaatattatgattccacttacatgaggtacttagaatagtcaaattaatagaggcatacagtagaataatgattgccaggggctgggaggaggagcaaatgggaagttattgtttaatgagtatagaatttctgtttaggaagatgaaaaagttctggagatgggtggcagtgatggttgcacagcaatgtgaatgtacttaatgccacagaatagtatacttaaatatggtttgaatggcaaactttgttacatacattttatcacaattaaaaagtttgaaatgaatatccaaagaagcattatttatgaggctaaaagtggaagtaacccaaaagttcatcattgatagctaaaggaaacatggcatatcaaaacagtagaatattagtcatacaaaggaataaagtacagacacatgctgcaatacagatgcaccttaaaaacattacactaagtgaaagaaaccagacgtaaaaggccaaattttgtatggttttatatatataaagtcgttcaaaataggaaaacccataaagactgaaagttgattagtggtcaccaaggcccgggggaggaatgaatgaaaactggctcctaatgggtactgggttttttggggcgagggggacagagtgatgaaaatattgtagaatttgatagtaatgataggtgagagtggcataattttttttaatatactaaaacccactgactcatatactttacaaggatgtattttatggtatgtgaattatatctcaaaacaccccttaaattttaacgtatggcttttatgatgccatgtttctaaagaagcaacgtgtcccagtctcagcttactatttctaggcatgtgactttgagaaaaaattaagagacctcccttcttactctgtaaaatgggaataataataatgatgataatgataataataatgatcttaccagatttttttgagtgttaaatgaggtaacatatgtagtgcatctagcatagtgtctggcatttaccaagaaccccgggaacctgagcttcaactgcttctgatactattccagatactatttcaggatattccaatactgtttccatatattcaggacaatggaccaactcctttagccattttatcaaaactctttagattctgtttcaaatcggtctttccaaagtcttcttgtgctcctttgtagacactcttcagtcagagagagctttttaatctcctccaatttgctgcagctgtatctgtgcctcaaaacaacgctttctccccattcctcttttctctctgcccttggaactctgtggacttctctcatgtttttaacctactcccttttatcagtgcatgtcatctccacttatttgtagcacccaatatttttactacatctttgaccaattaagtcttacttgggttatgtttttaaagtaggtatcttattaggtggtccttttaaagtatatgtccagtctctccagctaaattaaaacccttgagcacagagaccacatgttataatgttttaccttttccatagcacttagcatgttaccttgacatggcatatactgaatgaatgcttgctatttatgagtttagttagtgccacatctcatgaagtacagggacttaatgattctcaatcctgacttcatcttacagtcacctggagaataaagtttcctcttagctcaacaagtcagaatctctgagcaaaatcctcaacttcttacctaggtgatactcttgtaagccacactgtgaaccactggattcaacagatgaagtaatataagccactggctcttaagcctcattgattattgcggtgaagatgtgaagactaaagatgctttgggcatggcaaagtgttctacagatattagaattgttattatggtacatttgagagtgtcattgctttgagaaagattctctaagttttttaacagccacactgtaatggaaatatccaattataggtatccaaaaccttttaaactctttatatcaggtgtatataccctgttcctttttgctaacttaaaaatgttcaaactctgtcttctctaggctggcaaacattcagcagcacaccctctcaagattgtttacttgcctttgctcctgttgagttacaacgcttggaagcaggagatgggctcagcagcagccaataggacatgatccaggaagagcagtaagggactgagctgctggtaagacagtggagacagttgacacttgtttgtcaagtatgaatttattcctaatgtaatggtaatctctctcccaaacttcaacttcaagttaccctgcaccctctcaaatacttttctttattgtctatgcttaggacacatggattagattgttaagatttgtgaatttactaaagttgtgtactgacttatgtatagctgtatttttctggagaaagatagatttttatcaattctcaatgtctatggagtttttaaaaagaggtaaggattattcaaatgtaactataaacataagaaaatgtgatatctataaccagttgttagagtatttatcgcctccattttgcttcacttgtagccacttcgtctcaatcttgttaaggaccaaataaatggtatttgtggttacttgctgatctgaaaagtgagtacctcctgcacctggctagtcagtcttgtgacaatttggtgccatagaactagcagagaactaaattatggaatggcagatctcaggagcagctatgtgattttacatacggtttgtttttaatggatagagacagagtctggctatgttgcccaggctgctctgaaactcctgggttcaagccatcatcctgccttagcctcttaaggagctgggattacaggtgcatgcccccaggcccagttcatatgattttctgaaaatacaaaagaaagagggagatacaaaatacttttttaatcatgttcttataattatcttaataaaaatcaatttgctctgaatgccatgacctgctgagtgtcccaacctaagggttgtcagaccattttctcatatatgcatgtatagaagtagggaactaatatatttttgtctaaaatgtttaagatgaagatgagaatgaattctacaatatataattttgcctgaactatataagacagttaaaattatagagacattgcaggagagactctggattagatagaaaaaaggaagaattaggctttttttttgtctataatccttttagtaggtaattcagcttcagtttcactaaatcttgtttatgcattcagcataacaaatcttctaataagcctgtatagctctaatctctgccttactgcagacacctgaggatataagtatccactctgccacttgatacttctcagagactgttctggtgctgagaaatcctttccagtgtgtcctcagttgaactcccatgattcctggatgttgccattttcaagacacagggcaagcgcatctgtctagattacctctctaccttgggaattttaagtcactctgtgagggaaagagaactcagtatagtagtaactctcagaatgaaaattttccccttgcatgttaatatttttagagtaatcattgtcactgaaaatagacttcctctttcccctctcatgctggaaaatcttaggtaattatgaataaagcattctttacttttcccctcctcccttgatgattgctttacctcactctgtgagaactgtgactactcattctgctcttgtcttttacatgagaactgagagcgcatttttaagatggaattttcctccttaatgaagtcataacattagtcagaagattttctcttcttgaacgttaagcctgggtaaggaataaagtgcagaagtttatggaaaattataagataacttaaaaaaaaaacgaagacaacaaattaaaatattagccattgagggaaaaggttttacaggtagctctctgaggagttcttccctcatatctcctcaaaaatcttgttttgcatttaattttttacagttggataagctcagcccttgacatattttcaatagcaaataagcctagagtttatttttagtacatttattaggaatgtgttcttgggaaaattatttaacctctgtaagccctgctttaaatggcaaagaagaaagtaggtaataatagataataacaggattattttatgcattacctgtacattgcccaacatatagtaagttctcaattttatattggtatttgttttattattaaccacttttattaatgttgcttttagtttttgaaatatgaattcattcaaaaatatttcttgagcacctgccaaataccaggcactcttctaggaactagagtggcattaatgagtaagaggcaaaaatctcttcccttgttgagcttagaatccattagagtaagagacagacacatacaaaataaaatgtataatatagtaaataccaagaagtgctaagttttaaaaatgtaaagcagaaaaaggaaattgagtggcagggttaggtagtaattgaagatatagtagtcaagtaaggcagcttcaagagaagattatgtcttaaataaaaatctgataaagatataaaaacaagccatgaagttatctgaaggaattgcaggtagtggagaacagccaaaagacctggagtagtaaaaggttttatgcagagtgatttaaaaagaatcacagtatcttatacatcagtaaatatttacacatacacttaagtaagtgatatggacaagaactttggaagttgaatagcaaggtccatctggactataacagaggaggcttcacaaaggaaggtgacagggcatggcctggatcctgaaggacaggaagaattgggatcgataacaaagaatgacatcccagtggagagaagtggaggggaaacagcatgaaatggagtgaaataagaatgttggcctttagggcaggaatgggccaggcagagggcaagtgggaagcaggaaaaaggcgaccttgtataaagttcatgttggcaaatagagagaagatgggaaagcagggtaaggccaaatttagtaaaatcctaaagtcaagctaaagattattgcatgctatcctgaaaatattggggaataattagagcagatgagtagaaaggtgaattcttgtatttagctatatcattatttttacaaatttaaacaaataaggaaatggaggcagtagttggagtaatttaggagataaattgaaaatggattttgttaagagagaagggaagatagattttatatattttaaggaaaaatcatgaggatttatttgctgactgcacgtaagagataaaagagaggagtcaaagatttctctaaaattttcaaaatgattaattacgtgttggtattaaaagaaatagggaagttgggacatatgagtttgaattcagcatgagtcagttaagacaatcagatgcagatattcttaaggcaactaaagttcatttgatatttgtcatataggctgaattaagtttctaagagctgtttttactatgcattaaatccgtgtaatactaacatagtacaaaagttgtttgctatccaaattttgtatttttataataagttggagagacagagaatcaaaaaattattgatttggaaccattagacatcagctagtccaattagttcattttgtggaaggaaaaaggatacccagagatgttacatgactttatagccatgcctctagctagtatctaacttggtctagcccaggtctccatactgagactctcctcctgctaataaaaaaataataaaaaagtattagtggtttgtattttgctggcttgcttgtggagaataggattagaaggtttgacttgcctgttagcactctcttgtagccatttttctaattaacatacacattttaccctttctcatgaaacagatctaacttgtttagaagcttcagtcttcttgatttaattaatcactttctcccacctttagtcattgttgaagtttcctgatttacaatgttatctttttatcttttcagtagtataaggaggaatgatatttctactgttgtactatttttctgtttatctttcagaagaaaaatagcttttcttattggcccaaaaaaccatcaccctacaggaaataaatcacactctttgcttgattttcctgatctggctactgatttctcttcaaatttaagccaatacttagactttaagacttcattgttacttccttacaggtcattcttatgaactaaaatccatagtcattgttctagcaagcctgagcagtttattctttgagtcacaggattataaaagaaaaaatagaccttagagatcataatacagtgctcttcaaactgtactcttcaatttttctactacttatcagttgttttttattctaataaaatataattacctagcaagtgagcagacatgtatttacagtagctttacaattctttatacacttctttactctctccattacacatgccacatggtatgatacaagtcataactcaactatgtgaaagcaaaaccactcttatacatggtgtcttgcatatatattaaggcccagagtggtatcagtagtctctgtgtcccaagagactgaattaaacaagactgttgaccttcttgtggcatttatctgacaaccttggcaatccctaaattcacaaatagctgtatagcattttttgcatttaatgcatatccacatatgatgtgtcctttgattttagaacaagtaaagcatgctaaaatagactgcaccttatgaaagtcattttcactattcttgtgtttcagtttcctcatcaaaaggtgaaatatcagctgcctctgttgatctcaggatcttttaagtagaaatggaagagtcttagtgaaaacagtttgtattctgaaagaaaattgcaatgtaaatacaggcactaaaaacgtttattcatctttacagatgttaatctgaccagacatttttctcaaaatgtgaaaatagtatggattttcttagctcatttaatattgaaagactagaaaaacaagtaatgatgttctagaagaatctatgatcatataattacagttgtccttcagtatctgtgggagattggttccaggaccccccatggatatcaaaatctgtggatcctcaagtctcttatataaaatagtgcagtatttgcacatgatttacatataccctcccatatacttcgaatcatctctcgattatttataatactacaatgtccatgctatgtaagtagttattacactgtattgtttagggaatagtgacaagaaaattaatctgtacatgttcattacaaacacagcaatccattttttttctgagtattttgatctgtgattgattgaatccacagatgctggaatccatgaatacccatggggggctgactataatgttgtctatgtgcgtagcaattttgtaattctcaaccaaggacacgtatagtccttgaatcttggtaggagtcttggggacttttcttaaaatattttgaccatcttctcaagatcttgactcctacccccacttgtacacgtgcacatacttgtgcacactcacacacaatacccttccttaagtcctgctcaccagcttgcttcctattgcattgagagcattcaacctgtagaccaagaacttctaccatatttttccacctctaccccaaaacacagtttagacatatccattcttttcattcttcagagtcatctcaccacttccataaattatttcctaattgttccctctgcctctgttcttttttttttttctgatgatcagttcaaagtacctctgtatgcccattcttaagtgcaaatctgaccatctataccccttcttaatatcctttcttttatggatacccatttcagactttattaaaggagtggaagcttccccctccccacctcaccacttgaagtttttgcaattagaatggagtttatttggttaatgcaaaaatagatgtgatgtagaattcttggggacacctacttatccccttttcagagtggccctgaatagctctgtgaacccaggaatctgaagaactcagtacagaaaaccatcagcctacagaaagtagatcaaactctatgcttgatattcctgatctggctcctggttactcttcaaattcctccttactatattgtcccttcagatttgtaaatctttaccgtgacatcgtattttacacactgaacctttgtaccgctgttcctctcctgatgaacttcccttttctcttaactacacagctcagatttctcataagggaagcttcatatttgttgtggcactgttgttcctcaaacatcctacttactgtagtcatttgtttatgcttgtctcctttgcagattctgaaattcctagggcaaaggctgcatcttgtcttcttattactaatattttacacagtatctggttacatagtaggcattcaatcatacaatttaaaagaagaggttgactttgtgatctttttcatatgttttatttccctctccccctactggcaacttcttcctacttcttaaaatagatacagcacttgcccactaagtggagggaagaggtgtgggagtcgagtagttggaacttcaagtgtcaaaacatgataatctcatttgcaaagttacattatatcggagcttgaacctcagagatacttaattataagcaacacttgtggaacatttgatacctacatttttttcactaaagtatcctatcaaaattaaatgtgttgcagttgagatttgtgaggttttagctatttagagactttagggatatgtttagtgttctaattctaatagtattgatgaatataaatgtttcactgtagaaagagaagtttgagagctgttgtgaatgatatttgatgtctattaggtgataatttctgatgactaaacatgctcaagaccttagtgagaaatacatgaatacagaaaatattttgaaaattatgagaagtttatcattgattatagattttcttatccagcagtttttggttgtgttctgtttttcactgtcagagaagcagaaagtggtcagtggactttagaatgtaggctcttgtaggaggccatatgtttgagagtgctgtccaggtgctttgtgatgtggctgagaatggatgcaggcttgcagggaaaaactaatactgtagatctctagagagcattttaggaaagacttctaagctttaggttccctgaccaaagagtaaaaagtgattcttaatatccatagctatagaggaaagtaaatacacttcccacatcaaatgtagaattaaatatttaggcatttcaagtgtatttcatttagaacaaaataaaatcatatattcactaatgaaatataaaaccagatggtctctgaaaggtttttccctttactcactttcagagtaaggcaaggaagagtagttttgttttttaatttatattttaattgtccctttctgtttttccaaaagttttattttttgaaagtgagtcaccttttagacatttgaaaaattagaattactatgatgtttattttattagtaagtcttcctagagtagcaacgtagaaaagcatctctgaatgcctacatagtaagtatttaataaatgttttttgggccaggtgaggtagctcactcctgtaatcccagcaatttgggaggccgaggcgggtggatcacctgaggtcaagagtttgagaccagcctgaccagtatggtgaaaccccatctctactaaaaatgcaaaattagctgggggtggtggtgcatgcctataataccagctactcgggaggctgaggcaggggaatcgcttgaactcaggaggtggaggttgcagtgagccgagatcgtgccgttgcactccagcctgagcaacaagagtgaaactctgtctcaataaataaataaataaataaaatacataaataaatgctttttgatttaacgaaggtgtcattgtcctatgaaaaggaaaactatcaaaatatattttttaaaacttagcttttgataatgatatggaagatatttctcttaattaacctaagtcagaaactaaaatatgttataaaatgctaacatcaaatatttgagaccagttaaaggagacagaaggaagttatggagaaagaagcagtagccagaaaataagggcaagaaaatgttttctaaatttatgagaatcagaatgtttacaaaattgctattattatcatctggaaaaaatatgccttgtaggctgaaaaaatgaacattccctttccataccatgcaggaaccttctttactgcattcctaagaggactagtctagcacctaattggatacttgtggtaatatttgggaactcactgatctggtacatcagtgtgggagtcgagtagtcagaacttcaagtgtcaaaacatgatagtctcatttgcgaagttacactatattagagcttgaacctcagagatacttaattataattaacacttgcagaacatttgatacttacatttttttttcactaaagtgtcctaccaaaattaaatgtgttgcagttgagagttgtgaggttttagctatttggaaactttagggatatgtttagtgttctaattccaatagtattgatgaacataaatgttttactgtagaaagagaagtttgagagcaagttgagcaagaatctgtcactctaggtcttctactctttattaaagaatgttggattcatttataacttactggtcccttaaatattaaagtttggtgtttggtatcttaaacatgattacatccttatagggctctcttctaattgcctggatactgcacatctattaatacagtctcaaagcacacttgcttttttgatagtaagagcgtacgatttaatcacattgaagttagtccgcaaaggtttttgtctttttttcaggcaagcagctgatgaatgaatctctactatccttcactttgtgactgtgattttctaaataaatgttggagattttaacttacaatttattaatttccatcttgtttcttcaagtccctcctttaaggaaatttatggaaatctttttccataccatcaagtggcttatttctttttaacttttttccttaagttcaggagtacacgtgcaggtttgttgcataggcaaccttgggtcatgggagtttgttgtacaggttatttcatcacccaggtattaagcctagtacccattagttatttttcctgatcctctccctcctcccaccctccaccctctgataggccccggtgtgtgttgttcccctctgtgtccatatgtcctcatcatttagctcccacttataagtgagaacatgcagtatttggttttctgttcctatgttagtttgctatggataatggcctccagctccatccatgtccatgcaaaaaacatgatcttattctcttatatggctgcatgttattccatggtgtatatataacacagtttttttttatccagtctattattggtgggcatttaggttgattccatgtctttgctattgtgaataggactgcagtgaaaatatgtgtgcatgtgtctttataatagaataatttttttttcctttggtatatacccagtagtggggttgctgggttgaatagtatttctgtcttgaggtctttgaggaatcgctacactgtcttccacaatggttgaactaatttacattcccaccaatagcatataagtgttcctttttctccgcaacctcactaacgtgttattttttgactttttaataatagccgtcctgactggtgtgagatggtatctcattgtggttttgatttgcatttctctaatgatcagtgatgttgagctttatttcatatgtttgttggccgcatgtatgtcttcttttgtaaagtgtctgttcatgtcctttgcccactttttcaatggggatgtttgtttgtttgtttgtttttcctgtaaatttaagatccttatagatgctggatactattgtcagatacataaattgcaaaatttttctcccattctgtaggttgtctgttttctctgttgatagtttattttgctatgaagaatgtctttagtttaattagatcccatttgtgaatttttgctatgaactggatctgatataagcatatgtttaattttaactcccaggtcacactgtttttttttgtttgttttgtttttgtttttgtttttgtttttgtttttttggagatggagtctcacgctgtcaccagtctggagtgtggtgatacaatcttggctcattgcaacctccacattccgggttcaagcaattcttctgcctcagcctcctgagtagctgggactacaggcacacaccaccatgcccagctaatttttgtatttttagtaaagatggggtttcaccatgttggccaggatggtctctatctcttgacttcatgatctgcccgcctcagcctcccaaagtgctgggattacaggcttgagccaccacacctggccccaggtcatacttttaatcaaaatgagaaaaaagattgacttcactggagtgcttatgtcttgttttatattcaagttttaaatttatgttcttgagattattacatcttgagttacttgataataccacggttgaaatccatgttgttgaatccttcaaccccttgaggactgagaattccctttaattatctgtctgaatcattaaatacttgtaaatcaagagttcaatttagaaatgttatacttgatacattttttaaagctggataaattaacctattaaacaaaattatctcttcttcaaaaaaaaggcatcacttcccccacaaatgtgtaatttaggaattgttttctattggagtggttcacgcttatatattttagttgctctaatgcaaggtgtttcctaaaaagtttaaggaaagtataactttattttcatgtatgatagtaaataatacaatagggggtgcatttgtgctatgcttgtttttgttcccatttcagtgctcaattactgtagcttctaataaataaaattatcagttgctaacatttaaatcaaacagttccacaagtggaagtattgcttatttgtgagagttgtgtttttttaaacttaaccttactgaggggttttaaggactgctaattatagattgtactaagcaaagtataaagtaatagaaggttaccaagttgaggctagaattcaattagtgccaatacagttaaaatggtatcattaacagaacatcttcatccaggaccttttttttttttttttttttttttttcagacagggtttcactcctgttgcccagactgcggtgcagtggcctgattgaggctcactgcagcctcaacttcccaggctcaggtgatcctcccacctcagcttccagagtagctgagaccacaggggcatgccaccacccctggctaattttttgtattttttgtagagacagggttttgccatgttgcccaggctgttcgcaaactcctggcctcaagcaatccacctgcctcggcttcccaaagtgctggaattatgggaatgagctgccacacccagcccctccggaatctttagattaccaacttctgtcttccaggtttttatgtccttggaaatttatgcatatttttagaggtaagacccatcctcatcttcttcctaatccttgacatattgtgaacacagatatatatacaattaagtagttccctgagttacaaatatacttaaatatactttaacttattatagaaggcttacaaaaactgtggataaataacatatatttatcttagttaatgaataactgatgctgaaaataatgtgaatgtcaaattagttctctttttttctagccctcacctttgaaaagcctgagcctctgagatgtgagatgactgctgtaaagtgaagcagcgaatttctagaggctgggttcacgcttcaggtcctctaaatcctaggtcgcttcccactactacatactaccctaaaaaatctgtaattcgcaaatttattttttgatctttttcataacttattaaatttttattgaacaaatacaggaaacagttttaaattactcattgctcttgaatacattggtgattatttttcttctctgaaattctgttttccttaaaggcagtcattttttggtctcttctaaatgacacttagtatttttagtaacatcataacttcagtggccacagtgagccctcattttgcaacatatgcctacttttcatatctggcttgccttttattatttataatttaatgaaaagaaagtaccactctttccatagttttgtaatagaattgctgtcaacaaagtagtggatgcactatgttataaagatttcattgtgaaaacatgaaatggctgttaactatacatcaggcaaaataaaaacaggaaatataaacatttcctggaacagggcagagtatgagtaataaggtatcaaatataattggatacctgaccaaatatttttaaatgtcttaagaaatgtcactggaaagactggagtacttggatttgtctcttattcttattttgattcctaacactgtgcttggcacatggtaggtaattaataaatgtgtgatggatgaataatgattgtcattcaattagtgactaagagagttggaaagggctatcaatttcaaattggttcctttaagacatttttacgtaagatttgggagaaaagtaaaagagcaccatatgattatgctttactaagagctgcttccattcctacattgaccatgtggactcatatttggcctatataattacattagaataaacaaagcaccaaaagttggaaaaggaagtagtagtaggagagggttttaagctatgtatttactgggaaaaaaagtcatgttttcttttttaaaaatgttctaaacagtactgtaatcacttgggaattgaatgtgctttgtgtcagacaaaggtctttgtatacaatacattacattttgtataccaatacattacattacacagaagggagtgcctggctttgtatacaatacattacattttgtataccaatacattacattacacagaagggagtgcctggctttgtatacaatacattacgttttgtataccaatacattacattacacagaagggagtgcctggctttgggaaacacatctacctaaactcttaacatagcacaatgctgccatacggtaggtaataccaagacaaatcagggccgttattaacaaccttgaggaaatgtcttgggaaatatttaaataatttttgtttaattataataaggaatctacagcctctgtgaagtcatcccaaactcttcgaggcaaatttagtctcctcccacccctgttttttaatgtttctaaaggatgttatgtataatctattagaaaactggccaagtgcagtggctcatgcctgtaatcgcagcactttgggaggccaaggcgggtagattacctgaggtcaggagtttgagaccagcctagccaatatggcgaaaccctctctactaaaaatacaaaaattagccaggcgtagtggcaagtgcctgtaatcccagctactcaggaggctgaggcaggagaatctcttgaacccgggaggcgaggttgcagtgagttgagttcgcgtcactgcattccagcctgggcgacggagtgagactccgtctcaaaaaacaaaaacaaaccaaaaaaaaaaaaaatatatacacacacacacacacacacacacacacacacacatacatacatacattagaaaactaattacattgttttcttaaaatgttttaagcatctctcttcctcaaggacaagaatcttgaatccttagtgcatatgaggtacttaatagatatttaaatgaatagtgagctactattgcctaaaaatattagacatcatgtaatatcaggcctacagttgatagaaaaagtattctcaactaagaataatttaccaatggagaaaactgttagttttcccttctttttctttgctttataaaatttaaatgacattaagagttacgtttcttggaaaattgaaaagaatatctgtggcacaatgggctctgggtataattgcaggataatttgaaaagtttaaagaatattttcaataggtataagtttatttaggctctgtgtctcctcttgagatgactttagcagtatatatttccctggaacaccatgcactctaggttttctaatttattggtttaaaatacatggcattttactacgtaaatattctctgtatctgtaggtacagcacctctgtgtacactaagttagtgtatgtatttttttaaaattgccttagttttgctattcactagattattttccaaggaacctactcttagatttattaagcctactatatatattttgttattaactaattctcttatttttaaaaattacttttcctttctttgcttaaatttgctttgttttcctaaattagtgatttggaatacttaattgtttttattttgttttgttttgtcaataaaagagttttaagactctagttatactatagctatagccaatgcattttgagaggtgcttacatattacaattattttcagaaattccttatttcaaagctttgctttctttgaacaaagagttatttaggaaaagaaaggaataaaaatctcaacttattctccacttgactagctttattatttgcagtattctgttttttacttgttctaatacttctttatattttgttgtggaattatgtcacctaacaatattttccttaacttcttaattttagcctgttttccaagttaatcatttatctgttgtttcaatgaatacctaagaaaattttctttgtcaggataaggcacatgaggtctaagatttatttctagaacagtaagcaaatcatttctgaaagtgtgttcttctactattaagtaacatgtttatttttgtcttttagttgaagtcccccccaacccaataggtactattctgatttgttctcctattcacacattcttgaaggagagctgatttatctgtacccacaaaattataatataattttctcagagtattcaaaacattgtcttttttatttttcttttttttgagtttttcactcttgttgcctaggctggagtgcaatggcaggatctcagctcactgcaacctccgcctcccggtttcaagagattctcctgcctcagcctcccgagtagctgggattataggcatgcaccaccactcctggctaatttttttctatttttagtagagacggagtttctccatgttggtcaggccggtctcaaactcccaacctcaggtgatccacctgcttcagcctcctaaagtgctaggattacaggcgtgagccaccacacccagccgaaaacattatcttaatggagcatttagaacgttatcactgacaaacttttttctattgaaaatactgcttaaaagatcaggtcatgcccaccccacaacccacaccctttgtatttctcttttacttgtcttggcctctagttcagatttatagtttggtaatgtctgattttctttgttagtgcttcagcccatctggttggggaacagctctatcccactgggacctctccctttcctcatgagtgacgccagggtcctgctgcccataagcattctgtttgctgagtttgtatatatttcctttccccagcttcgctgcctttggctgctttgtgattaagtaagacatacccatgtttcctaaagcctccttcgcctttagtccttgatgctggggaccttttggttgggaagacagcttccttatgtcagggtgagcctgctacacaggtatgtaactcagacagtgacctactgttgagtttctgtttagtgtttctttgtctccctcaaatggtacaaacgtggagggcttcaactgcagtctacctttgtcctgttagttttgtctatcacagcccatgccctccaaataagagatgatggagcagtctgcttattttctgtagcactccacaactgactttaaaagagggactgggattgggctcttagtgatgacttttaatgtggattcatctgcattttctctagaaattctttaaactctctgcctctcagctggcactattccatggtattttagtgctaatgggggatcttttctaatttttgtttttctttgactgtttaaatcatttactggaaagagggcttagatatctgctcatatgctcctgctagtctacaagtcctccagcctgattttgttcatgaacatgatggaaataagcttcttaaatgcctttaatattggatactgctttcaaggaaatttaaaatagcaagcaggctttcaagaagagagaataaattatcagccagtctcgcaagaacaaaaataagccaagtcatataaaacaagtttggagtaaacttgtttttacatttcaaattcgagttgaactcttcaagtgaagcttcagagatataaaaaactttaactgataaagattccaaacattaatatatggaaatgtatgagctcactgaaaattttacataaattttactagaagaggtgactgaccagttgcttttataagattctcaaaaagatctcaaatcttagggactaatattgtaagtatacggggaaattaagacaaagatttactatcttgtgagtttttagtttggataatgaacttaatttcacaagaaattgctttagcacaaacatgaaaaccttaagcatgagaactctccttttgaagtacaaagggagactaaagtgaataactcaaactggaaatgtagaaaattgaatttgctatgatttgaagtcctttcagaatagccaacagattttaaacaagagttttattgcatagtttctttgggatatacattgaaggagaaaggaggagggagttttaaaagacaagtggaaagccctttctgcttgttttggctatggcttccatttcagtgtctgtatttaagggatcataaaaggaactggaaagactggtcacaatggcagctctgtacctgtatgatttcggatgtgaaaagagtttagcgatttccttgttaacctatactgctgtggaagtcattcattatgcagttaggcattagcagaacaaataaagttcacagctctaggaaccaaatttaactttatcactcttctgatttagaatattttcatatgctttcatatgtcctacagacgataagaagatagaatcaatacttggtgattgataggttattttttaaaagggaagaaagaattaaacatccatggtttcttcttaagtaactggggggatgatagtatccctcacaccaatggggagtatagatgacaggtttggagtgaaagacagtgaattccattttggataagttgaatttgaagtgcctatgggacatacaggtacagatgactaggagacaattgaaaatccaaattgtgaactctgctgaagattagaagtacagatctgagattaaattgctacttgagttcatgggaataaaataggtcattctgcaaatggttatctcaatatcttcctggccatctcttgggtcaccttgccaacttttcattctctttacaatctctaaattctcatgtttttaaggctctcatcttaggccaacttatcttgggtcaccttgctaacttttcattctctttacagtctctaaatttgtgcttttaaggccccattctcaagctggcttctctgttttggtgggaactggtagcaaacattcatttgtaaacaacccaaatggctagcattgagcaggactccccaacatactcctctgaattacattttgagttatctgaaggatcaatatctcaaactaggaaactgtagctttctcatttattttcatcatctaattatttttcttgcctttaagtataagggatagagacttgattgatttttatgtacaacaagttaaaaaatttaattaggcgtctttgccatttaatcagtttatacttcttgaatcttttccagtcatcaaaaagttgctgagcatgcgcagctttacttactagcttatagcatgaagaagagtaaaataggagtggataaaggcacagtggtgagtagtcagtgtttccaattaatctcaaagtttaggattaatttagcgtgaattctgttcttttgtgtcttcctgctttttgacgtggtaacctgccataacaaaaggaaacagcaggaaacttggtaccaattaaaacagtcttcttcccccaaagaacgaactgtcagcaaacaatctcaaattcaaagtgataagtgttttagagtgaaacaaggataaagagacaaggctattaaattttaacatctgctggaacacaaagcgcatgccagtagaattaagtttggcatttaataagatacaatttgcacatcagaaatgaaatagatgcctcaaggcatggtatatatatatatatatatatatatatatatatatatatatatatatatgtttgagcgaggggcacttctagcaaaactgaatacactggtataaatgtctgcgtgaaaatttttttatccattcacttttggtgtgtattccagctgtgagttattcaaccaggctcactaagtttgagtctgattaataacgtttaaggtcacatctgattaacagtatttgaagtttgaatttgttctaagatgactcaagcgcaataacattttctatatcaaaatgaatttccatccaaatagggaggaaatctgaaatttcagttccagtgttgactgagatgctctggatgagcctggactcagagctcaccaactttggatctttatgttaagtagtcagtggggttgacttctagactagagatcaaaatgttctacacctcttgatataggtcagtggctgatgtaatgtgcttccaacaactttcttttaactaaaacagtacatataccaagttggtttgtcacaatgggaacaaaacagaaatctgacaacagatttctctaattttttgtgtgtatgtttctgaatgggctaaaatacataattttactcttccttggtgaagatgcttttataagaggacgtgtttaagaaaattaagaaatgttgtaggtagccatgaaagaattattttaaacagaattagtatagaggtgtgaagatctactgaagggtgataagtaagtgtggaagagatggtgttcagcattgggcttcagtatgaataggtagaagatgagcaaggcttagagacaagaagttcattcaataggctgttgcggttatccagcaatgagatggtgacagcatgagccatggtagtaaaagtaaggacatggataatttgtgggttctacagacaataagaacatagaaccgataggttattttttaaacgggaagaaagaattaaacatccatggtttcttcttaagtaactgcgtggatgatagtacccctcacactgatggggaatgtagatgacaggtttggagtgaaagaatgaattccattttggataagtagagtttgaagtgcctatgggacatacaggtacagatgactaggagacgattgaaaatccaaattgtgaactctgctgaaggttagaagtatagatctgagattgaattgctacttgagttcatgggaataaaataggtcattcagtaaattgttatctcaatatcttcctggccatctcttgggtcaccttgttgacttttcattctctttacaatgtcaaaattctggtgtttttaaggccccaatctcaggctggcttctccaactgtactcttacttgggatgatcttatctagtcatggggcattaaataccattggtaggttaacacagttcacaattttctccagcttagaccccttgctgatttcctgacttgtacactcaactgcctgcctaatatacccactttaatgataatgtacatctcaaactgagcttattcgaaatagaagccttaatttttctgtcagtcatattgttcccatttacccatcctaacaaatagcaccatcatcaaccttttagctcaagacaaaactctaggcattatcttgctttcattcctttcatgtactttctcacatctaatccattaccaagttgttctgtttctgccttcaaaatgtgtcctaaatttatccatttctctgccactgctattctctagttcaggacattctatcctttctcttgtattactgcggtctctaaacttcatgtatctatgttttatacttttaattcattgtctatacagctaccagagtgatcttttaaaggtctaaatcagttcatgtcactgctttatatataatgcacctatggcttcccactggatttaaataataatcttaacactttactcctccatggcctttacatacttctagccgcacctcaaaacactcctcttgttcactgagaactaactagaccagtttctcttctcctcagctatatcatgctaatttatgcttcagtgccttttgtacttttgttccctctagctgaatcattcttccaggtcattctatcattggctttttcattcagttcagatagatatcagcaaatcaagagagtctttccttacctgctctatctaaatagtcctgttttagtcctctttatctcatcactcagatttatttccctcatagcactcatcagtctgaaattgtttgtttatttggctacttgtttgtctagataaacttcactggtgaaggaatccagactatcttgttcatccctacatccctagaacctagaacaatatgttaaagataaataaataaatagatgaaagaatgttgaagagaagagggtccagtccagccccctgaggtgaccagcatttagggaataagccgaggcagaggagggccattaagaaggagcaatgagagatagaggaaaactaagaacaaggtgtccctaaagtgagagtgtcctaacacaggtctaaatgaaaggatagttcagaagagggcactgcagctggctgaaagagaacaagaaaggctgtaaggtggaggtgaatttttaattgagccgtgaaagatagggaaattctgtatgaaggagtaaatggaggcatagaggcatagaggcagaagatgcatgcctgtttggggaatagtcatcccatttgtctttcacatatctcatttaatacttctcatttaatccttttagtgttaatgttgtcactagattaaaaaacaaaggctccatcaggatcacacagtaaacagaagaatatggatttaaatggagatctatctgactgcaaagactacttactgtaacttaagtcattgagattccttatggccacctcatattcaccctgcatataacagtatgccaatgtaggaatgaggcgtgaataagcagggtaacaatagaaacatattctcaccttgattattcctttggtagcttcaagggaaattgagtttgaggataaagtaactcttcccatgtcagcactttatctgtcctgaaacatgagaaattccaaatgttcaagccatgcagtttttatctagtcagatggttgagaagtccaggttacccatagttgtaatgaatacctcctctttatcttcttaatgttctgctttgccaaatgatctataaagattactcagtgtacctttcagattgaggtccagcagactttcagaacactacatttaattacagaaacccaactaataaaataataagctcatgttagtttcaggtgttgatttgtttttaatgtagtcaataatatttacatataatgactggcaacttaacagagttataatagattattcacctgtatttgcctttatttgtgggtatacacacatatatacatgccttaaactagagtaaaatcatttatgcatactaaatcaaatttgagagtcccaaaattttcaaattgtgtatggctggtctatattttctaggactgtcctttctggtttaaatgaaattaaaaattgaattaatgatattagtctcttttaattttctatttttttcatgattaaaaaatattaatttccagccaggtgcggtagctcacgcctgtaatcccagcactttgggaggctgaggcgggtggatcacctgaagtcaggagttcaaaaccagcctggccaacatggtgaaaccctgtctctactaaaaatacaaaaactagccaggcatggtggcacgtgcctgtagtcccagatacttggatggctgaggcaggagaatcacttgaacccaggaggcggaggttgcagtgagctgagattgtgccactgcactctagcctggtcgacagagtgagaatctgtctcagaggaaaaaaaaaaattaattttccccattcccccacccacccaccaaaagactccattggagttttattttacaaatgcatctgctcatctacttctttttaagtgcataaactagttttacaagcttgagtttaaatcttaactcctcaattctttttctgacatagaaatatacaggtgcattatgaaatagctaatagtgactattttctagggctgtaactcaatatttataagcataatgatataacctgctgaagtttgacacgtcagtatagttcttttgttattctaagtcataaaggcagaatttggaaaaattcacagcttttcaaatatgcagaagaggaaaaattgagaggaagcatactaaaatttctttagccaattttaatcaaattgagtttgaaacttacaggattatgcttcaaagcttgtaatgatcgtcaaaagtagccttattcaaaatgacacactaatttctaccacatctgtattcttctcattgtaagatgttacatatacctatgcttgaccaaatggacttcctgctattttaagatatttttctgtgttttaagtctttctacaaattttctcaagcatttccctttacctaggatgttcttctttcactgcaagtgaagacattctaaaaattcctaaagcacactaccaaaagcccttcatttggatgacccaccttcctatgagtctccatagttgcatgtctgatggcatttattttaactctatgatctgcttctaaattagataaaagctctcagagagaactatgaccaattgtcattctgtttcccatggcacctagtacagtactctgctcacaggctcaataagtaatgagttgagctacgtttttttaaggcagagtctccctctgtcgcccagggtggagtacagtggtgcaatctctgctcactgcaacctctgctgctgggttcaagtgattctcctgtctcagactcccgagtagctgggactataccaccatgccaccatgcctggctaacttttagtagaaacaaggtttcaccatgttggccaggctggtctccaactcctggcctcaagtgatccacctgccttggcctcataaagtgctaggacaaaagtttgccattgtcatgttacgatatatattggtttttgtccatggtttctggttcatagctccaatatccctttttacagtcttttgttagaatgtggggtgtgttggacctcggggcaggccttagaaaacagaatctctcctgccttcctttcacttgtcccccgagggagatttttttttttttttttttttttgagacaagacttccctgtgtcacccaggctggagtgcagtggtgtgatcatagctcaccgcagcctcagcctcctaggttcaagcaatcctcccatctcagcctcccaagtacctgggactacaggcacatgccaccacacctggcatttttttttttttttttttttttgtagagaggtttcgccatgttgcccagtctggcctccagctcctgggctcaagtgatccacccaccttggctcaaaccaccacacccaaccctgagggagattctaatcttccccacccttctgattttgagtcttaaaaccccagagaaggtcccaccctttgcactggggaaaggaatgctgatgatcatgaagcctccataaaaactcaggaggattgagtctggggagcttctggatagctgaaccagtggaggttcctggaaggtggctcatccagggaggacttagaagctccgtgcactttccttatacttcaccctaagcatctcttcatctgtatcctttgataaaccagcaaatataagtaagtgtttcttgagttatgtgagctgcttgaccaaacgtattgaacccaaagagggtgttgtgggaaccccaactcgaagctggttggtcagaagttctggaggcctggatttgtgacttgtgtctgtggcaggagcatcttgggaactgagcgtttaatctacggggtctgacactgtctccgggaattaaattggaggacacccagctagtgtctgctgcttgttattggggagaaaccctcacacatttggtcacaagagagaagttttctgttttgaatattgttgtgatgtgagagcagaggaaaaatgcattttggagaggttttttcctacacagccataggcagtgataagaatatgatgcttttttccagaaaatgctacatgagacctttttataaaatctaattttcttcaactgagtagcatttaaactaaaaagaataggttatttcagtgtctctctgtaataacatcttacaatcacttgtcagaccatgaaataatgttctagaaaatcagtgaaagagctttttaaactttgtgacatttgacttatatttattaccaaaaagcctgaattattattcagcacattataattttatttaaaatttaaattagagatgaaatacttgtaaatgtttataagattggtagctgtgtgggcttccagagttagaaatgcctctgagaaaagatttagagttttgaaagtattttgaaaaaagaaacagaaaggaatacaacatttttcccagcactgcttcaataatgcagtcttcagcatcatctcaaagcaataactgcagtacagatgagatcagccagtttttttttcccccttatctgcagtgattttaccatctcttcatgctacatcttaccacaaagagaacattgaaacatgggaaagagtttgctttgatttcaaccagaatgccaactcatttctggggttctaaaccataaccttttttagcagagcagtgtagaatttttatacgataccataaatggtcggcctgagtaacattttaactgtaagtcaatacctttgaagagacatgtctgacaactcagagttctattttctccatgtgtgactaaagtaccttttctattaagagatcaaccaccatttccttctactctttgttctccccttaaataaagttaattcagcttcaaaatattttatgatcttgattactaactgtgggtctttagaagacaatgtaaaacatttccatgctgtgaatattagagctagtatacttggagtttggctagtatttctgggggaggtagaagaggagacatagagtacaaatgagtatttttaaagccacgctgactaaaacaaaaggaatgttttatacatgtttatttcatagtacttctttgaaacaggtcggggggaggagagttaaaatattgctttgaattttaatcaaagttctttcatggaattgttggtgcttctggtaataacagttctataatctttgtgagttaatctgaaatgctctttttcttcatcgtaattcagtgcttgtcttaactggtggacttattttatggtattatgtttataagatggcaactaaaatcagattttttatactcctaaaagatggatacgatagaggggaaagggggtaagctacaacttttaggttgttggtgatatttgaagtgtttattgcttctgatttacatttatatattatattcaaatataaactttaaaagtaatgatttgccacaggttaaagcagaacatttatatgatatttcctagatgttttcctctacaatcctgtttttgttctatgaaaaatgccataaacttggatcattcactaattaatttgaagctgttttcaaacaaaaagctaattcatcttttagcggatttagttataatcgtgataacagatgtatagctaagtctgttggacaaactgttggtcacatcaatcttaaatgcatcatacagcgtgatgtgaatttatgatatttcctaggtaatgttaaggttatatggaaatttctttgcaggtagttaagtcttattttgaattcaaatgttattttcaatacatacgtggaagtgtattttttgtttgtcctaaatgtttagattttttgagtttacaatttttttgtgtgttctttctttgttcttgcccctccctgcattctctatgaagatacatgtcagcactatgcaacactaaaataacaatcaaccaaattatatcctatgaacagacctttctcttcatttcaaaggcataacttggatggtctgtttagctcatggtgaaaaaaaaaagttatgattttgtatttgggcaaagtacaggtgaagagcgtgaatcattagaacagcaatataactggaagaagatagtttagtttttacaagttaaatttgaagctaaagcaaaacttgcataggtatgtgtcctttgctcttgaaaatgaactcagaactctacatctgagtggttttatgaatttatactctcctagtccacaggttctcatcagtgcctcaagatctatgcacagattaaaattacataagatatcatatactacatctgaattagggttttccaaagtatgctattccatggaaatactgtttattcagggtgctccataaacaatgatcctgtgtttcattatgtccaggaaatgccacacagcacctttccagacatcctatcatcatattaaagactttgaggccatgcattaaagaaagttttaaattagaaaaaaaataagttttcttgcttgagcacagaactttattttttctcaggctggttctccttttttaaaattacacgttaatatcccaaagaaccagtcccatagatagatatcacatatgataagaatctgtttcaatggtgttggtgtacatgtgtgttcaggtacctacacattaggacacatctctagtttattaatactgcacttataaagagacatggtagagacatcaagaagacatcattttagggtggacaccattgcctaggacctgcttcttaatgtcaaaaattcagaaacccaattttatctctcccgcagagttgactcgagtgaaggaaattgagttgttttaattaaactcacatgagattgatgtttaaacaaaattgtaagtttatcaattaataatcaagaattctgatttttaattttcaaaatattatttatgtccactgtccagggtacttgctttaagggcacccagtgattcttgaagatgaagagtcttaggaatatttattttctagacctcaatgaagaaagctttttaatcatcctgccccatagaagaatttatgttcctagtgatgtgatcatattggccaatccagtgtttcttttccaaggacagtactgataaggagcaccaaatctacctctttgtcctgaacagatcatctccatctattcatagtttggctcagaagttggacaaggctgcattttatatctacttcttcctcatgtcggctatgccatgccgtttcgttcttttagcttgtttacttatgtgtaaaatgaggtaaaaattacacccttcaaaccgaaagtggtcttcgtgatgagttatttaattgaagccccagtagatatttatcattgccagttttagagaatcatagcattttagaacacaagatgaccttagatgtaatcatgttcattcccctcgtattataaatttttaaaaattgagatgtggggtggttgtgacttgctcacaaacccacatttagaaccaaaactcagcattcttgttctgactgtgtctatgtcctgtaggtatatgtcttgtcttctcagttaaataattaaagattcttaaagatagagaccatattttatgcaacttctggatcccataaattatgtttccagaagaaccttttgtaatgaaaaaatatatataatgtctatattatatatatagtctattactattttgataatctaaaacatgctatataattttaggcgatcttaacctatttatcagagcttttcagatcaaagaaaattagagtaatcttcatcatgtatgggaacattgatgtatttttctgatgaacacatggttatatgatactcttttaaagcatctgtattactctttcttctgatagactggttattttgtttatgttatgaaataatgttggcagcttttcattagaactgatacatattgaaatttcttaaattgatagctcatggatgtgcagttggtttaatggcatctccattattaatctttaagaagatcttcatcttactctcaaaaataaccgtaatatcctacaaattaactaaaacatgatcattgctagttgttccaaaataggaagaataaaaatgaccagattgttatggtaaccagttgattaagactagatcaataggaaaacgaatttattcaagtctgtacaaaacttctccaaaacatagatggcatgccttttgaggcaatggtagggaacaaaatatttttgagaaggagcagattttagggatacagtacagtacataattgccaaaatgcttgtgttacaaggattcctggtacagagtttttaaataaaatgctaggtatgtcatgtttgtttcacattaatattgtagagtcccctggggatgtgacaatttagttgaccaactctaatatagttaatttctaccttttgatagctttgtggggttttgtttgtttgttttttgttttgccattcttgattttagggctgaagatatgagacaatgtatcaaacagtaaagaattatgcattgattaagatcatcttggtgaattagatgtttattatataactcgactttaagactttgttcagatctcactatcttaatgagatttaccctcattatatagtatttaatagggcaaccactccccgatactcttgattcctcgttagctgccctattatttctttgtttttcccttagcactcaacattttcttaccacaccacataatttactttcttattgtgtttattgtttttctcctcattagaatatcaggtccaagaagacaggagtatttatctcttttgttcagtggtgtgttactggtgactactagagtgcctgacacatagaatatgttcaataaatattcgttgcatgaaagaatgaataccttgacagattatttttataactctaccagtgtcattatataactacactgaatgattatgagccctcctagaaattacataaagttcttatatattattagaacccatttgttggccttatgtaatggttctattggaaaaatcatacctccgtatataaaaatgaaagtattttttttctacaattgcccctcatatatactattatagtctccttcaccccattcagccattaatgtcttcttgaccaggtaacataatttttacagcaccttttggttattagaacaattttatttgtctttcaaactcagtcctattcattttaaaactcccaactcaagcctgagtcagtgttcttctcccagcacaaacttaaacactggctccaacccttggagttgaaagtaggggagcctcactcctgatacctcccctccccctctaccgtgagcaccagtgcctaggagattgggcaggactgaggaaggatgaaaaggagctcagggctccttaagcacctgaacaagactggaggactttggatgttgctatttttctgcctggcattgactggctattggacgccctctgtgaggcaggcatccgaatactggctttcttgacatatatggagcgttctttagagaggcctacaagggctctcactgcacagtaccctgataggagagatctgtccttatttcttctatcaccatagctacttcagctttgcctgctgagtccaccccacagtctctttctgctggggcatccttgccctggacagattcttagagcatgaccaagcctaaacaacttctgcaatttttctaagtacacttttatttaattgaaagtttcaagcattggataatataaatgtatcctagacagtgttccagtaaggacaaccagctcacaattatccattctaataatgggagtcaactgaaatagaaaaatatagatttttaaaataatttatgagaaacaaatatttgtgacacagtacatttctaattatgtttatctttattattattattatcgtttccttcagtacacactagtttggtgagacttggagaaaggccaggaataagcccaaattcaaaaaacaattccaggattaacagataagtggataatagagaattgacaaaagatcatgctcattttaccaataagaaactggttggttaacttgggttgcaaactgaaagcagatttatactaaactggcaggtgtctccagatcttaaatgcagatctctatctctgagttaatctgcctctcatcttcaatggcattcctctgaatttttctccctcaaataatctatatattattaaattttgtttatactgccattttaagaaacagattttaaaactttaaacatgggaattaaataggccctactgaggattatgaaaaacctgacaaaacctcctatgcacatgatttagattaggagcagtgcacacgctgtatgtgtatgtgcagctacttgtccaattaacaccttttcagaaatggaggaactttctctgaggactttgacatatttgtgtgttcagcagtcctttttctttttttttattttttatttttttattattatactttaagttttagggtacatgggcacaatgtgcaggttagttacatatgtatacatgtgccatgctggtgcgctgcacccactaactcgtcatctagcattaggtgtatctcccaatgctatccctcccccgtccccccaccccacaacagtccccagagtgtgatgttccccttcctgtgtccatgtgttctcattgttcaattcccacctatgagtgagaatatgcggtgtttggttttttgttcttgtgatagtttactgagaatgatgatttccaatttcatccatgtccctacaaaggacatgaactcatcattttttatggctgcatagtattccatggtgtatatgtgccacattttcttaatccagtctatcattgttggacattagggttggttccaagtctttgctattgtgaatagtgccgcaataaacatacgtgtgcatgtgtctttatagcagcatgatttatagtcctttgggtataaacccagtaatgggatggctcagtcaaatggtatttctagttctagatccctgaggaatcgccacactgacttccacaatggttgaactagtttacagtcccaccaacagcgtaaaagtgttcctatttctccacatcctctccagcacttgttgtgtcctcactttttaatgatcgccattctaactggtgtgagatgatatctcattgtggttttgattttcatttctctgatggccagtgatggtgagcattttttcatgtgtcttttggctgcataaatgtcttcttttgagaagtgtctgttcatgtgcttcgcccactttttgatgggattgtttgtttttttcttgtaaatttgtttgagttctttgtagattctggatattagccctttgtcagatgagtaggttgcgaaaattttctgccattttgtgggttgcctgttcactctgatggtagttccttttgctgtgcagaagctctttagtttaattagatcccatttgtcaattttggcttttgttgccattgcttttggtgttttagacatgaagtccttgcccgtgcctatgtcgtgaatggtgttgcctaggttttcttctagggtttttatggttttaggtctaacgtttaagtctttaatccatcttgaattgatttttgtataaggtgtaaggaagggatccagtttcagctttccacatatggctagccagttttcccagcaccatttattaaatagggaatcctttccccatttcttgtttttctcaggtttgtcaaagatcagatagttgtagatatgtggccttatttctgagggctctgttctgttccattgatctatatctctgttttggtaccagcaccaggaccatgctcagcagtcctttttcaagagatgtgaagtacatcttcacagatttttaaatatttagatagaaagttcttacagaatgagaaataaaaagttagctttgccttaaaaatattaattcaccttatattctccatacttaatccatataggaaacattatattccaggtctaacatgtggcttgcttacattaattttgctgttgaaaaatatatgttttggattatgtttttaaaattttagctttaatatttaaatattaaataatgttaactttaaattaacgaagaatagtttttaattttataagaaatgccctataaaaaacactttctttacctcaagagtgagacttggcaaccataccaatattacatagtaattttaaagtcaaacgaaatggagagaacttaatagatacagaagataagaatttaaactaacattttgctcgggattttagaacactatacagagggaaatttagtagacaataatgaagtccatagcattgcacacatcttgaaataagtgtataattgacacaagctatgtcccatgttgataggaagaatccaaaatagttttggagaataatgccatctatgcaggaggtgtggccatatacatcatctttactcagtgtttttcatgtcaataaatatttaattcctaacactctgaattactaatagaggtgaagcctgtcagtggaagtgacagagagatacacagtgattcccgtaagtttgatcctgaaacacagtgcctttagcagatatagttcccataagcaagcagtctgaagtatttaccctcagtaatctgaatgtataaataaacaggattcatgatggtagagtaatttatatatacttgtagtattaggacatgcaaaacttattttatggaaaaaaataatttactaccttatagtatggcaactatacaaatctataaattgactcttttgtccccttgaaaaaaagctgacataaaatttaaatgatgtgtattttttcttagagcaataaaagatatacccccacctagaaaagcaataaaccaaaaaataaaacaaaaacaaaatcaagccctcttcacaaatttgagcatatctacagctttatgtggtgagagatacagctaccattcttgagtaatccgaagagtcaaatggtatggagcaaaattacagtcctaaatgcatattggtgaaatgagatgctgatccatttgcacactaatgtgctatttttaagtcatgcatcatagcatcttcaaagaggcctgtcataattatgatggattagactgcagagtcagtcctagatgcagtaattgtttcacagatgctgccaatgcgactagaatttataataaattattttcagagaggcgggagaaggaacaaaatcaaaggaaaactgctgtggctaaaacctgttttggtcttaggaaaccaaaatgttagctagtagtcaaaaggccagtattttcaactgagataaacatgcttcattaatacatgcctctgacatagaagataaaggttaacataattgacatatcagccagtctctctctctctctctctctctctctctctctctctctctctgtctcgtagcttatgaaaatttattctggggcattagctgaaattattgagtggccatataattgttgcatgtttctatttatgttaaattgcctggttataatttgacctttagaatttctgaaaaaaatggtggtatttatagtaaatagaaatattctttttggttccttggaagcccatgcattacaaagaacattagattattggaataaaaggatagacatacataatatgactagtgggatctaaattataaccttttaaaattgtaatttaattagtctgtcatttaggcaaatgataatttctaaaactgcctttttagacttaaaaaaataccaaagttcttataactttagcattatgttttgttcattcttaaagtttaattcactttgttgcctttttggtaaacctatgaagaaatctcatgctgcaccatatagtaaaaaatcgtgtgtgtgtgtgtgtgtgtgtgtgatttgaataatgagctatgtgttatattttgataagcaaagataagtttatagtgaagcagataaacatgccatgtattttcctaggttaagggttcaataatcagaagagcttctacaactcatttgccttctcactagtttttttgaaattgcgctctatgagttttttatgtggtgttctctgtacttgctgactactgatgcacatttctccttaggtcactggttctcctccctcagcaatgttgtaggtagctttgatgaacattcgttgtcagccttttacctttgacttagtgtttttctctcatactacggcaagaagaaatgaagttaaattttacaagagtgacttgggtggctgatatgcccacattgacagggacaagagctctagtcttcccctctcctgtattcccatggcacttcagtagtctcattgcctcaacataaccacagttcagggcagtagaggatgtttgcatctttgtgttagctccatgccatggcaactgcactgagtgaggattcaactcagtgcagcaggactgaaaaaataaatgaactaatgtgtcttgagctccaattctctgagtgacattatcaggggagattcataaatcatcctcaaatattctagagaaaaatcatcagcagtccagcattgcaaagataatctgggaaggtggcaaagaagggatcagaataactctgtggcagcttcaaattccatgtcctaaaagtttacgttttcttttttattctatcccaaaccacataaagaaatgatttgttggcaaaagacatgcaaaatgcccttaatcatcttaataattacagacctacagatacgtagccaaaatacttgttttttaatcctaaaccttaaaaaaaaagcttaaattgttggctaaatgtgaatttaataacaaaacttactcctttaattatgcacttgtcttagtattgtgtggtgggaagagctttagagagctgccagagtgcttaggcctagtccctgtgggagcctctgttttggtgcttcaccatgggcagattcctcagttttcacatctttaaaatgagaaaatggtactagatccttgctgctactctgaaatgtttatacattgttaggaccattgttacatattattacttatatttgagtgtcaccttagaatttcttagccgtgtgatatggtttggttgttggctcctctaaatctcctgttgaaatataatccccagtgttggaggtgggggcctggtgggaagtgtttggattattggggcagatccctcatggcatggtgctgtcctcctgatagtgagttctcaagagatctggttaagggtgtgtggcacgtccccctccctgtctccttccctccctctctccttccctccctctgtccttccctccctcttcctccctcttcctctctctttttctcccactccagccatgttagatgcctgctccccttttgctttctgccatgattataagttttgtaaggcctcacccaaagcagatgccagtgctttgcctcctatacagcctgcagaaccatgagccaattaaacctattttcttataaattacccagacagctatttctttatagcaactcaaaaacagcctaacatacctttcaaaaggttaaaatgctatttagtcattccagaagcaagatctctttgtccagaattctggaaataaagatgccaaaataatatggcatgtatttgatctcagggaattttcattttttcaaaaggaggaaaaaagagtaatataattttttaatattttggtagctctaacagtgcttagaaccagttctcaagagcacattgtgaaactttcaggaattgcatgagctgtaggttgataacatgatgccagctataacccataagagcatctcctgaggaatatgttaaaaactgtattcattcttaaattttaactaaatgcaatgagtgaagtattgacatcatgaaaatcatccctgggtaaacaattagtcactccaggttttcccaaaggttcttctgtctctgttcttgtatataaacttcgtaaccagtttaacaaccccaaaaaaggccttaattttgattggccagcatcctcttaggaaagacattgccatcctcttgtaaagttgcttctcattctaaaataagaattgtttccatctagggaatgatttttataggtagaatcttatttggcatggactcttttgcatacagtgaattacaatgtgtagaccttcaatagcaaggtgtttgaatatttagttgcacaatagagcagtatcttaatattgtataccatattaattttgtgttctctggtgtaagaaaaaatagaaggatgtttaatttcaactaaaaaatcaatcatgataattcaaaatatttctgatgagtcatttataagagcagatatgaattaaaattatatttttgttcttagtctctgagaagcaaaaatcacacaaataatctccatagcaaaaatttatatttatctgaaaaacagtttaactttgaaaaacttttctttgcaatcatttaaattcataaaaaaaattcattaactctactttcactgaatagcaggtgaatagcaggtcaatatctacaaaaattcatctttgaagatttttttatcttacgcaaaaattattgacttcatgtagactttttatgcaagcttgaaaacactgtgtaaatgaccccataaaaactacagcatgaaagctttttcagtatttctacaatgagcaaaatgcataggtctcatttccttctcttttattaagcaaaataatactttatcaacatcagtatgcaagcactaagagcttgaaagagtactgtgcaagtgggttactggatcataatattccagggtatgtatataaaaagtgtgatttagcacatattaaagtaaaagaaaatattgcatttttctccttctaaaatggcagtttattagtttaaatttcctgaaataagatttaaagaccaataacaaattttcctcattctaacatataactttcctgcccttcttgtgaaaaagttaaccattaaacttttcacacaaatggttgtataaaggacttgctgtcacagacaaaatagttctgtataatgtttaaaaatggccattgtgtttaaaactccatattgaaatacatttcttttttagtcaccttcatttcttagtagctattattatactcaaaggatttgcccttgacactttaaagaatgtccaaaattatgtggaatggattataataaaagataatatattaaatgcttaaaatattttataccttagaaagtagaaaaacatgtattatgtacagatcctacaaattttatataatttatcataaatgtacacatgtatatacatgtaaataccttttgattgctctgtatatgaattggtgttttacagttaccaaaagaaaagtgcctttttttggtagtatctggacaggtaattgactttctttctgcaggatttatttagatttatgtctatgctccttaatttttgaaaagtgatagtgtcctgattttggagaagcctctcatatcaaagactacaaatcaattttcatgattttaaaacctaaagtttctttattaggtgttattgatgattaaaagccattgtctcacccaaattttctacttgttcaatagaaacataatgtaagccacatggaattttacattttctagtactcacattaaaacaagtgaaaaagaaacaaattgatgatacgtttgatttaacccaatacatttaaaatagttcaacatgtattaaatattttttgagtatttttgtgtttttttaacactaaatctttgaaatccaaactaaatgttttcatagataccacatctcaatttggactagacacattttaagggctcaatagctatatgtgactagtcactgttggatgatgtatatctagaccatctcttaatgtatggaaggaagtaaatctagcagaaataaaaacatcactttgttttctttgtccaatatgagttataactttatttttttgagacagagtctcgctctgttgccaggctggagtgcagtggcgcgatctcggctcactgcaacctccgcctcctgggttcaaatgattctcctgcctcagcctcccaagtaactgggactacaggcatgcgccaccatgcccagctactttttgtatttttagtagtggcggtgtttgaccacgttggccaagatggtctcgatctcttgacctcgtgatctgcctgcctcagcctcccaaagtgctgggactacaggcgtgagccaccgtgcctggccttttattttatttattaagtaatacacatgcttggaagttatttaaaaaaaaaaaaaaggaatagttaaaagtaatccccctcccagtgcttttctccagctgccccattccttttcctggaggcaaattattatggccagttcattatatattctccagagatgatttttttttattttacaaaggtataggttgtagcattcttatataaactgttgtgtagcttcctttattccatttaattactgggagatacttccatctgaaaatatagagatactaattttaatagctacatggtattatattgtgtggctgtaccataaattatttaacataacccttattgatgtaggttgtttctaaccttttattactgcaaaagattgtgcctacatcatttaatgtatatatgagcatatttgtcagatatatatatatatattttttgagacagtgtctcactctgtcacccaggctggagtgcagcatcacaatctcacctcactgcagtgtccacctcctgggttcaggtgattcttcttcctcagcctcccaagtaactgggattacaggtgcctaccaccatgccctgctaatttttgtatctttttaggagagacgggatttcaccatgttggccaggttggtctagaactcctggcctcaggtgatccactggccttagcttcccaaagtgctgggattataggcgtgagctaccacacccagcctgtcagataaattcttaaaagggtcaaggaaagtgtttctgaaattttatacatattgccaaattgtcatcctacatgatatttgtggcagttttgactctcaaaagccacatgagagagtatctgttttcccacatgcttgccaaacatagtatagtatcaagcttactgatcttcactaattggagaagagaaaaaaactgtaccttgttgcagttttaatttgcatttctttttatgagcaatagtagatatcttcttaaatacttaagagccattcacatttcattttctatgaactgtccatgtcccttgtccattttttagtatgtggttattcatttatttgtaggcgtcctatatgttaagaaaagttttatacaacttttaactctttttacatgtttattttggcacatataaattttagcaaactttcccatcttttatgacttctagattttgtttcacaaaaaaagagcttagccagtcattagatttttttaagttttctcagattgtttttaacttttgggggggttttatttcctgtattcaaatattaaattcatctagaatttatcttaaagtgtaagggaatgatcccactttatcattttttcaggagattacccagttgttctaatatcaagtatgtctttgaaatcccatccttatcttgtagcatatttctgtggtttgggtctatttttgaacattctgttttattccattgatcatattaatattatatgtgcaaacacaaactattttaagtatagtagctttgttgcttttaaatatcttttaatttggctactaggccccatacaattctttttcagaatattcctggctacccaatttgtttatttttccaaatgaactttggagtcaacttccttaattcctcaaaatattctgcaagtacttttagtaagagtatattaagtgaataatttgacaactatctaagaacatattatagcttttcccttgttttgtttttgtacttatatattagtatagttttaaagttatattaaaataggtcttccacattttaaaaacttattcctagtgtattaatttcttctattataactacagtattttattccagtaaaacttctgactggttgatgctcttataaatcaaggctataaatttttcttcagctactttgctgaattctcacaaactgtaaccattttttacttgattctctaggttgaccagtatataatctttttatctgtaaacaataactttagcgttgctttcaacatctatattcttattctatttcatttttcttgtttatcaagaaatagctgttttaatagagttgtttttcgcccaaaaagaaaatagtctttctttttctacttatatctttaaaataaatgtaatgagaaagactgtgggaaaataaagcagacaccttatacaatggattaatttttttagtgccatttcttctggctttctctattattgggactctgaaatcttcgttagtactactctcaaaaatgttcgaatgaatgcaatcagattcaagggtacaagtgcaggttatataggtgaattgcatgccttgggggtttggtgtacagactattttgtcacccaggtaataagcgtagtacttaataggtagttttttgatcctctcccttctcccatcctcaaagtatccctgctgtctgttgttccccctctttgtgtccatgtgttcttgctgtttagctgccacttaagagaacatgtggtatttttctgttcctttgttagtttgtttaggataatggcctccagctccatccatgttgctgcacagaacacgattttgtgtttctttatggctgtgtagtattccatggtgtatatgtaacactttctttatccagtctactacttacggacatttaggttgattccatgtcttcgctatcattaatagtgctgtgatgaacatacgtgtgcaatatgcctttatggtagaatgatttatatccctttgggtaatatgccgaataatgggattgctcggtcagatggcaattctaagtcctctgaaattaccgcactgctttccacaacagctgaactagtttacattcccacaagcaataaggggataagtgttcccttttctctgcaggaatgattaattcttttagagagtcaaagatggaatcctagggaagatgatatctgaggcaggtttagagtcattgggcaaataaggggattaagaaggcattctaggcagacagaaaaccaaaggcatgaagctctgaaacagcttactatgtttggatatttataagctgttgttattgttggagtataaactgtaagagagagtaggaggacagaaaaaacagcctgtatgcggggggaagaaaacatttaaacagaaattctcaaaagatttgggcagccagcccctctagagaaaaacatagaatcacctagaaagggtttttcataaagtacacttttcatcacccctattctgtcacctggaatattgataacactgaagggagtgtgccttatctctcaggtgtatttggatgaaatagtttgagaaccatgcaggcaagtttaagccagtgtgttaaagagaatatgacatcagatttgcattttacaatcttccttttgataacaaagggaaccttaaagggctggaggggaagggcagacggggctaggggaggagaacccttttaaaaagctactgcaggtggggtgcggtggctcacacctgtaatcccagcactttgggaggccaaggcaggcagatcacctgaggtcaggagttcaagaccagcctggccaacatagtaaaaccccatctctactaaaaatacaaaaattagctaggcatggtagcaggcacctgtaatctcagctacttgggaggctgaggcaggagaattgcttgaacctgggaggcagaggttgcagtgagccaagattgtgccgctgcactccagcctgggcaagagagtgagactccatctcaaaaaaaaaaaaaaaaaagctactgcagtagatcaggaggaggcacagtgataaagagaagatctgagctatgaagtggcagtcaagatgattaaaggaatatataggaagtacagttgatagaacttagcaagtgattaggtaaatgaagtgctagagaaaataaaggggatatttttcaattgtttttagcattttggcaaaaaattatttaggaatgaaattgatgctagtaactaagagtatgaacttcccacattagctggtaattttgatcacccttgttctccatgaccataaatattttagagttgctatgaagacaagaatgtttatttcctgagtagctgtcagttgtcactatgaaacatgaaaataaatatcagtttgctatgtctaggtattccgatatttatccacaattattccttaagatatattagtatttttatagatagatagatagatagatagaaataaacacattttaatttttgtttccatgctctttagaattcaactagagggcagccttgtggatggccccgaagcaagcctgatggaacaggatagaaccaaccatgttgagggcaacagactaagtccattcctgataccatcacctcccatttgccagacagaacctctggctacaaagctccagaatggaagcccactgcctgagagagctcatccagaagtaaatggagacaccaagtggcactctttcaaaagttattatggaataccctgtatgaagggaagccagaatagtcgtgtgagtcctgactttacacaagaaagtagagggtattccaagtgtttgcaaaatggaggaataaaacgcacagttagtgaaccttctctctctgggctccttcagatcaagaaattgaaacaagaccaaaaggctaatggagaaagacgtaacttcggggtaagccaagaaagaaatccaggtgaaagcagtcaaccaaatgtctccgatttgagtgataagaaagaatctgtgagttctgtagcccaagaaaatgcagttaaagatttcaccagtttttcaacacataactgcagtgggcctgaaaatccagagcttcagattctgaatgagcaggaggggaaaagtgctaattaccatgacaagaacattgtattacttaaaaacaaggcagtgctaatgcctaatggtgctacagtttctgcctcttccgtggaacacacacatggtgaactcctggaaaaaacactgtctcaatattatccagattgtgtttccattgcggtgcagaaaaccacatctcacataaatgccattaacagtcaggctactaatgagttgtcctgtgagatcactcacccatcgcatacctcagggcagatcaattccgcacagacctctaactctgagctgcctccaaagccagctgcagtggtgagtgaggcctgtgatgctgatgatgctgataatgccagtaaactagctgcaatgctaaatacctgttcctttcagaaaccagaacaactacaacaacaaaaatcagtttttgagatatgcccatctcctgcagaaaataacatccagggaaccacaaagctagcgtctggtgaagaattctgttcaggttccagcagcaatttgcaagctcctggtggcagctctgaacggtatttaaaacaaaatgaaatgaatggtgcttacttcaagcaaagctcagtgttcactaaggattccttttctgccactaccacaccaccaccaccatcacaattgcttctttctccccctcctcctcttccacaggttcctcagcttccttcagaaggaaaaagcactctgaatggtggagttttagaagaacaccaccactaccccaaccaaagtaacacaacacttttaagggaagtgaaaatagagggtaaacctgaggcaccaccttcccagagtcctaatccatctacacatgtatgcagcccttctccgatgctttctgaaaggcctcagaataattgtgtgaacaggaatgacatacagactgcagggacaatgactgttccattgtgttctgagaaaacaagaccaatgtcagaacacctcaagcataacccaccaatttttggtagcagtggagagctacaggacaactgccagcagttgatgagaaacaaagagcaagagattctgaagggtcgagacaaggagcaaacacgagatcttgtgcccccaacacagcactatctgaaaccaggatggattgaattgaaggcccctcgttttcaccaagcggaatcccatctaaaacgtaatgaggcatcactgccatcaattcttcagtatcaacccaatctctccaatcaaatgacctccaaacaatacactggaaattccaacatgcctggggggctcccaaggcaagcttacacccagaaaacaacacagctggagcacaagtcacaaatgtaccaagttgaaatgaatcaagggcagtcccaaggtacagtggaccaacatctccagttccaaaaaccctcacaccaggtgcacttctccaaaacagaccatttaccaaaagctcatgtgcagtcactgtgtggcactagatttcattttcaacaaagagcagattcccaaactgaaaaacttatgtccccagtgttgaaacagcacttgaatcaacaggcttcagagactgagccattttcaaactcacaccttttgcaacataagcctcataaacaggcagcacaaacacaaccatcccagagttcacatctccctcaaaaccagcaacagcagcaaaaattacaaataaagaataaagaggaaatactccagacttttcctcacccccaaagcaacaatgatcagcaaagagaaggatcattctttggccagactaaagtggaagaatgttttcatggtgaaaatcagtattcaaaatcaagcgagttcgagactcataatgtccaaatgggactggaggaagtacagaatataaatcgtagaaattccccttatagtcagaccatgaaatcaagtgcatgcaaaatacaggtttcttgttcaaacaatacacacctagtttcagagaataaagaacagactacacatcctgaactttttgcaggaaacaagacccaaaacttgcatcacatgcaatattttccaaataatgtgatcccaaagcaagatcttcttcacaggtgctttcaagaacaggagcagaagtcacaacaagcttcagttctacagggatataaaaatagaaaccaagatatgtctggtcaacaagctgcgcaacttgctcagcaaaggtacttgatacataaccatgcaaatgtttttcctgtgcctgaccagggaggaagtcacactcagacccctccccagaaggacactcaaaagcatgctgctctaaggtggcatctcttacagaagcaagaacagcagcaaacacagcaaccccaaactgagtcttgccatagtcagatgcacaggccaattaaggtggaacctggatgcaagccacatgcctgtatgcacacagcaccaccagaaaacaaaacatggaaaaaggtaactaagcaagagaatccacctgcaagctgtgataatgtgcagcaaaagagcatcattgagaccatggagcagcatctgaagcagtttcacgccaagtcgttatttgaccataaggctcttactctcaaatcacagaagcaagtaaaagttgaaatgtcagggccagtcacagttttgactagacaaaccactgctgcagaacttgatagccacaccccagctttagagcagcaaacaacttcttcagaaaagacaccaaccaaaagaacagctgcttctgttctcaataattttatagagtcaccttccaaattactagatactcctataaaaaatttattggatacacctgtcaagactcaatatgatttcccatcttgcagatgtgtaggtaagtgccagaaatgtactgagacacatggcgtttatccagaattagcaaatttatcttcagatatgggattttccttctttttttaaatcttgagtctggcagcaatttgtaaaggctcataaaaatctgaagcttacattttttgtcaagttaccgatgcttgtgtcttgtgaaagagaacttcacttacatgcagtttttccaaaagaattaaataatcgtgcatgtttatttttccctctcttcagatcctgtaaaatttgaatgtatctgttttagatcaattcgcctatttagctctttgtatattatctcctggagagacagctaggcagcaaaaaaacaatctattaaaatgagaaaataacgaccataggcagtctaatgtacgaactttaaatattttttaattcaaggtaaaatatattagtttcacaagatttctggctaatagggaaattattatcttcagtcttcatgagttgggggaaatgataatgctgacactcttagtgctcctaaagtttccttttctccatttatacatttggaatgttgtgatttatattcattttgattcccttttctctaaaatttcatctttttgattaaaaaatatgatacaggcatacctcagagatattgtgggtttggctccataccacaataaaatgaatattacaataaagcaagttgtaaggactttttggtttctcactgtatgtaaaagttatttatatactatactgtaacatactaagtgtgcaatagcattgtgtctaaaaaatatatactttaaaaataatttattgttaaaaaaatgccaacaattatctgggcctttagtgagtgctaatctttttgctggtggagggtcgtgcttcagtattgatcgctgtggactgatcatggtggtagttgctgaaggttgctgggatggctgtgtgtgtggcaatttcttaaaataagacaacagtgaagtgctgtatcaattgatttttccattcacaaaagatttctctgtagcatgcaatgctgtttgatagcatttaacccacagcagaatttctttgaaaattggactcagtcctctcaaactgtgctgctgctttatcaactaagtttttgtaattttctgaatcctttgttgtcatttcagcagtttacagcatcttcattggaagtatattccatctcaaacattctttgttcatccataagaagcaacttcttatcaagttttttcatgacattgcagtaactcagccccatcttcaggctctacttctaattctggttctcttgctacatctccctcatctgcagtgacctctccacggaagtcttgaactcctcaaagtaatccatgagggttggaatcaacttctaaactcctgttaatgttgatatattgaccccctcccatgaattatgaatgttcttaataacttctaaatggtgatacctttccagaaggctttcaatgtactttgcccggatccatcagaagactatcttggcagctgtagactaacaatatatttcttaaatgataagacttgaaagtcaaaagtactccttaatccataggctgcagaatcaatgttgtattaacaggcacgaaaacagcattaatcttgtgcatctccatcggagctcttgggtgactaggtgccttgagcagtaatattttgaaaggaggttttggttttgttttttgttttttttttttgttttttagcagtaagtctcaacactgggcttaaaatattcagtaaactatgttgtaaaaagatgtgttatcatccagactttgttgttccattactctacacaagcagggtacacttagcataattcttaagggccttggaattttcagaatggtaaatgagtatgggcttcaacttaaaatcatcaactgcattagcctgtaacaagagagtcagcctgtcctttgaagcaaggcattgacttctatctatgaaagtcttagatggcaccttgtttcaatagtaggctgtttagtacagccaccttcatcagtgatcttagctagatcttctgcataacttgctgcagcttctacatcagcacttgctgcctcaccttgtccttttatgttatagagacagctgcgcttcttaaactttataaaccaacttctgctagcttccaacttctcttctgcagcttcctcattctcttcatagaactgaagggagtcaaggccttgctctggattaagctttggcttaaggaatgttgtggctgacgtgatcttctatccagaccactaaagcgctctccatatcagcaataaggccgttttgctttcttacctttcatgtgttcactggagtaatttccttcaagaatttttcctttacattcacaacttggctaactggcatgcaaggcctagctttcagcctgtcttggcttttgacatgccttcctcacttagctcgtcatatctagcttttgatttaaagtggcaggcatacaactcttcctttcacttgaacacttagaggccactgtagggttattaattggcctaatttcaatattgttgtgttttagggaatagagaggcccagggagagggagagagcccaaacggctggttgatagagcaggcagaatgcacacaacatttatcagattatgtttgcaccatttaccagattatgggtacggtttgtggcaccccccaaaaattagaatagtaacatcaaagatcactgatcacagatcgccataacataaataataataaactttaaaatactgtgagaattaccaaaatgtgatacagagacatgaagtgagcacatgctgttgaaaaaaatgacactgatagacatacttaacacgtgggattgccacaaaccttcagtttgtaaaagtcacagtaactgtgactcacaaaagaacaaagcacaataaaacgaggtatgcctgtatttttaaaaaaagctttttgttaaaattcaggatatgtaataggtctgtaggaatagtgaaatatttttgctgatggatgtagatatatacgtggatagagatgaagatcttaattatagctatgcagcatagatttagtcaaagacatttgaaaagacaaatgttaaattagtgtggctaatgacctacccgtgccatgttttccctcttgcaatgagataccccacactgtgtagaaggatggagggaggactcctactgtccctctttgcgtgtggttattaagttgcctcactgggctaaaacaccacacatctcatagataatatttggtaagttgtaatcgtcttcactcttctcttatcacccacccctatcttcccacttttccatctttgttggtttgcaacagccccttctttttgcctgactctccaggattttctctcatcataaattgttctaaagtacatactaatatgggtctggattgactattcttatttgcaaaacagcaattaaatgttatagggaagtaggaagaaaaaggggtatccttgacaataaaccaagcaatattctgggggtgggatagagcaggaaattttatttttaatcttttaaaatccaagtaataggtaggcttccagttagctttaaatgttttttttttccagctcaaaaaattggattgtagttgatactacatataatacattctaattccctcactgtattctttgtttagtttcatttatttggtttaaaataattttttatcccatatctgaaatgtaatatatttttatccaacaaccagcatgtacatatacttaattatgtggcacattttctaatagatcagtccatcaatctactcattttaaagaaaaaaaaattttaaagtcacttttagagcccttaatgtgtagttgggggttaagctttgtggatgtagcctttatatttagtataattgaggtctaaaataataatcttctattatctcaacagagcaaattattgaaaaagatgaaggtcctttttatacccatctaggagcaggtcctaatgtggcagctattagagaaatcatggaagaaaggtaattaacgcaaaggcacagggcagattaacgtttatccttttgtatatgtcagaatttttccagccttcacacacaaagcagtaaacaattgtaaattgagtaattattagtaggcttagctattctagggttgccaacactacacactgtgctattcaccagagagtcacaatatttgacaggactaatagtctgctagctggcacaggctgcccactttgcgatggatgccagaaaacccaggcatgaacaggaatcggccagccaggctgccagccacaaggtactggcacaggctccaacgagaggtcccactctggctttcccacctgataataaagtgtcaaagcagaaagactggtaaagtgtggtataagaaaagaaccactgaattaaattcacctagtgttgcaaatgagtacttatctctaagttttcttttaccataaaaagagagcaagtgtgatatgttgaatagaaagagaaacatactatttacagctgcctttttttttttttttcgctatcaatcacaggtatacaagtacttgcctttactcctgcatgtagaagactcttatgagcgagataatgcagagaaggcctttcatataaatttatacagctctgagctgttcttcttctagggtgccttttcattaagaggtaggcagtattattattaaagtacttaggatacattggggcagctaggacatattcagtatcattcttgctccatttccaaattattcatttctaaattagcatgtagaagttcactaaataatcatctagtggcctggcagaaatagtgaatttccctaagtgccttttttttgttgtttttttgttttgttttttaaacaagcagtaggtggtgctttggtcataagggaagatatagtctatttctaggactattccatattttccatgtggctggatactaactatttgccagcctccttttctaaattgtgagacattcttggaggaacagttctaactaaaatctattatgactccccaagttttaaaatagctaaatttagtaagggaaaaaatagtttatgttttagaagactgaacttagcaaactaacctgaattttgtgctttgtgaaattttatatcgaaatgagctttcccattttcacccacatgtaatttacaaaatagttcattacaattatctgtacattttgatattgaggaaaaacaaggcttaaaaaccattatccagtttgcttggcgtagacctgtttaaaaaataataaaccgttcatttctcaggatgtggtcatagaataaagttatgctcaaatgttcaaatattttgattgcctcttgaattcatttgctaattgtatgtgtgtgtgtttctgtgggtttctttaaggtttggacagaagggtaaagctattaggattgaaagagtcatctatactggtaaagaaggcaaaagttctcagggatgtcctattgctaagtgggtaagtgtgacttgataaagcctttggtcttaaatcttgggcattttgatttgtaaatctgaccctgagaattgggttacccagatcaaagactcatgccagttaaaaagaacattacctgtattttttatcatgtgttatctcttaagaagaggcagattagttctaaaatcaacaaattgtatttaattgaaataatttagtgatgaggaagaggtccattctagtgcctgctaaatgtataatccttcttagaatgtgaagttgtccttaaacttttaaataccttcagttaatctttatattgtcatttatgaaaaccttgaactaagacttatgtatctttcatctagctctggttttaatgcaggtagcatttaattgtccccactgtactgggtatagtctgctaaacattaaggagtagttttgcatctctccttgttctgatactagggtcaaagcccactttttatagatgggcagcaaaaggcacattggacatgctgataaatgttgccctaattgtgatctaaacatgataaaatatacatacataagtgcccttatctgctgcaagtgacccttgttttgttttggttggggtggggggtgtttgggatggaatggtgatccacgcaggtggttcgcagaagcagcagtgaagagaagctactgtgtttggtgcgggagcgagctggccacacctgtgaggctgcagtgattgtgattctcatcctggtgtgggaaggaatcccgctgtctctggctgacaaactctactcggagcttaccgagacgctgaggaaatacggcacgctcaccaatcgccggtgtgccttgaatgaagagtaagtgaagcccagggcctctcccctctttgcggccactgataggaaagcccaatctttggttgaaaggaagagagttcagcgtgcacttttacatttataaaatgggcatcaaaatgcctgtttggcagtcatgcgataagaagttgtatttgctaatgtgaataacttgagatgatttcattatctgaattgtacagtttagccattaattaggagcagtcagagtgtctgtaaccacatggcctcagttataccataaacttgaaattgtttatgtgctcacatgctacaagtgacggctcctgtgtgcctggccactatattagtatgtattgactccacttccatgttgcagtatctgaaacagaaagtaagtctaatgagaaactttgggattcccaggtcaaataccttccatatgtatgtagcaaaaacaaaatacaaagcctagaagttctgtagaaatagaactgatttttactttcattcaaactattcattatttccacaatagtaatcaaaactgcttctacttttactgctgctaaatgatcagcaaattactggatatggatatatattattttccaggaatataagaatttagaatagaactgcaagagtatgcacttaaatatatttagtgcatccagttgctaatgttttgttttaaacaccatccactttgcatgaagtctaaaccttcagttggaaaaagcctcatttttaatattcctctactgtgctgataatcctgtataacactaaaagaatagatgaatgttcacggtgctacacagaaatgttttttttttttttttttttttttttgagatggagtttcgctcttgttgcccaggctggagtgcaatggcgcgatcttggttcaccgcgacctccacctcccaggttcaagagattctcctgcctcagcctccctagtagctgggattacaggcatgtgccaccacacccggctaattttgtatttttagtagagacagggtttctccatgttggtcaggctggtctcgaactcccgacctcaggtgattgcccacctcggcctcccaaagtgccttacaggcatgagccgccgcgcctggccagaaatcttacaagttattttgcccacgattggttttaaaataattttaattttgcactatttcctttagtgtctttttctctgcatccaccaaactatagaatcatttgctgagcttataagaaatgctcatactgctcattgcaacagctagccaaatttgtcctttgctgtttaaaactctaactagcatggttttactaaatttatgttaacacagtttctctctctgggttgtggggagacaaatcaattataaataatctctttagaaaagttactctttctatatgaaagtgtgacttgactttctatgataattatgatccaaaaattttatggtgtgtacctgaccacttttacaaatgattaattggaaggtagaaattgctgattcataacatgtaacttataaacttatgatggactactttaagcataaattttttttttttttttaagacagagtttcactctgtcacccaggctggagtgcaatggtgcgatctcggctcactgcaacctccatctcctgggttcaagcaattctcctgcctcagcctcccgaatagctgggattacaggcatgcactaccacacccagctaattttgtatttttagtagagacagggtttctccatgttgatcaggctggtctggaactcctgacctcgggtgatccgcccgcctcggcctcccagagtgctgggattacaggcatgagccactgtgcccagcctgaaatatttttttaatctaccctgactcctcttgctctttctgaagaaaaatttttaaaaatgtatgtaggtgcctttaattagaaaaaaaattaaaaattaaggcaacttgtgctcatattggtaatagcatttctttcaagaactcagtaatactgcattgtctttaaagcataatatctcttagacttgacggtttgagattctaaatcactgaagaacctcttgtgaaaatgatagttttaaaatttcttttcaaaaatagtcctattgcaaaatgtttgattttcttgaagtttcctggaaactatatttcattcattgtaatgaatttaattttcattaacatagatctctaatatttttctcagctcaccacaacctccacctcccgggttcaagtgattctcatgccacagcctcccgagtagctagaattacaggcacccacccggctcatttttgtatttttagtagagacagggtttcaccatgttggccagattgatctcgaactcctggcttcaggtaacccacccaccctggcctcccaaagtgctgggattacaggtgtaggccaccatgcccagccagcttttccataattcttataaatgccaatgcctgaaatggaatctgacatataaaaaattacatgaagaacttttattattttgcatttgaaaaccatgaaaaatagttggaccagagtctcagaaagcttgtagtttgttagtttaactgctctaaatgtcaggcagatacaaaactattaaaagacatgcttcaaatatgaagacaatttaaaagcacagctgtacacttttgctttttgtctagtttcaaggtaaagatgaataatcatttagataatgcttaagctatgcttatgcatacttagagcaattctccaaaataaaaaattttaatacttaaatacatgattaaaatagacacgtatccaatgtcaatacagactttactcagaaatagcttttgaagtttcttctaccccataaatagattttattttatggctggcagaaatgaaaattacaactttttgccaagaacagagaatagaataatctcaaattggggctgcggactcagttttatgttcaaagctgtgtgaacctcatcactgagttcttacaaatccctgtgtccacatgctccaaaccacccactgtgagttcagaaaagaactctgagtgcatctttcagtaggaaagtaaaaactgatttttacatttcctttgagccaaaccagctgtttcttctttaaagatttccctttgagatttccattttatgactaagtctaaccagtatttttttggcaagtaagagttgtgggagtgtatctgtcatcataaggaaatcaaagccagaaatgccttctgccatggtgggtgatgttaaacatttcaaggaactttatattataaaaattgtcaaacataaaaggaaaagtgcaatataatgaattccatggacccatcacacagcatcaatatttatcaacattttatcaatattttttcatatatttttcccacatccactcccactagtgtttgaaagcagaagacagataacttaccatcttacctgttaacatttcaggatgtatttctaacaggtaaagactttatcatttaatatttagactgtgtttgttcaaattatctgattagattctatttcagaaaacacacacataaacaaaaatgataatgagaaaaagaaagcccttccacatgattgacacttctgagtagtgtgatcccagttcatgtccattgtctgggatagctattaaataaaacttcctctcataaaattctctccatttagaagataaattctgtgattcacaagcctctttttatttataatagcccttcccctttctttatgaatttgaatttgttttttaaagaaactgtgattttctctgtaaaattccccacattctggatttggccgatttcatcttggttcttttgtttactttaacctattcctctatccccagtatcttctgtggactggtagtttgactggttctttttcttttctttttttttttttttttttttttttgagacaggctctcgctctgtcgcttaggctggagtgcagtggcccaatctcagctcactgcaacctccacctcccaggttcaagctattctcatgcctcagcctcctgagtaactgggactgcaagcatgtgccacctcatcctgctgatttttgtacttttagtagagacggggtttcgccatgttggccaggctggtctggaactcctggcctcaagtgatccgcccaccttggcctcccaaagtgctgggattacaggcatgagctatcacgcccagctgatttttaagtaatataagtatgtgtgcatgtatagtatacattggcaaaaacacttcataagtagtgctaaaatcatcttatttatatacatcaggagacacataatgtctgtttgtttcccattttagtgatattaagagtgtttagcatgtttagttgtcagcctgatccatcattatgttcttcatcaaactttcaccagatagtttcacatcaattgatgatcattgcctgtttctattattttgttttcaagttgacagttttctctcacttgatgttgtgtaaatttagttatataaagttaaattattttgctattttttctatgctgtatacatttgaataactgacctaatttttactttaaaaatattttacaattagaagtccaaatagtaaatcaaaggttaagaatttttgcagaaatctgttatatagatgacattttaatatttgccctttatatcatttaccatgagccaaatttcaagtcatattaaaatgactgtcatgtgctaattctaacaatatttgaaagacccctatcaaaataaatataccttttagtagccactttattagaaaatcaactttaagttattcccccatgtttttttctaattgagatataattcacataccataaaatttacccttttaaagtatacaattcagttgtttcagtacattcacaaagctatgcaaatgtcacctctacctagtttcagaacgttttcatcattcccagaaggaaaccctgtatttattaggcagtcacttccccttctccccttcttccttcctctaagtggcaaccacaaataaacattcagtttctctggatttacctattctgggcattttgtattagtgaaatcatgtatttggcctttctctctggcttctttcatgtacctcaatgttttcaagtctcattcattttattaaaaaaaaaaagtaccttttttctttttcttttttttttttttgtccacgtatatattcacaccacattttttgagacagagtctcgctctgttgcccaggctagggtgcaatggtgcaacctcagctcactgcaacctctgtctcccgggttcaagtgattctcatgcctcagcccccaagtagttgggattacagttgtgcaccaccacacccagctaatttttgtatttttagtagagacagggtttcaccatgttggctaggctggtctcaaactcagcctcaagtgatccttctaccttagcctcctaaagtgctgggattacaagcatgagccactgtgcccagccacattttctttttccatttattagttaattgacatttggatcgtttctactttttggcgattataaattatgctgcaatgaacatcggtgtacaagtttttgtgtgaacatgttttcagttaccttgggatatacacctaggagtgacattgttagtaatatggtaactttatgtttaactttttgaagaactgccaaactgttttccaaagtagctttatgcttttacatttctgccaacaatgtatgaaggttccagtgtatctccacatcctcaagaaaatgttattgtctttttaattgtaaccatccaagtgggtatgaagtttatctcgtgattttgatttgcattttcctaatggctgatattgggcatcttttcacgtgtgtattgaccatgtatttttttgagaaaagtctacttatatgtttttaattgtattatttttagagttgtaagaatatgttatgttgatacttgaactttgtcaaatgcctggtttgcagatattttctcctatcccacaggttgtcgcttcactttgataatgtccttaaagtacaaaagttttaaattgattttgatgaaactcaatttctttttaattggcagcttgtgcatttggggtcatatttaagaaatcattgcctcattcaagatctgaaagatttacacctatgctttcttctcagagtattataactttagttcttacatttagatttttaattaatgttgagttaatttgatggtgagagataagagtccaacttcattcctttgcaagtagctgtccagttttctcagcaccatttgttaaaagactgttttttttcaattaactgaccaagatgtatgggtttatttctggactcttaattctgttaatctgcatgacttttcttatgccagtaccacactgtgctgattcctgtagttttgtagtaaattttgaaatcaagacaggtaagtcttccaactttgtacttttgcctaccatgtttcttgggtttccatatgcattttaagatcagcttctccgtttcctttctggatttttttttttttttttttttttttttttttggtggagctggagtcttactatattacccaagctggttttgaactcctggctaaagagatcctccctcctaggcttcccagagagctggggttacaggcatgagccaccacatccaacccccttctgggactttgactggggttctgttgaatctgttggtcaatttggagagtattgatatcttaacattaaagcttccaatttatgaacacaggctatttttccatttattcttaaatttctttcagtaatgttttggatgaaacatgtacaaagtcctgcactttttattttttttaagacagagtcttgctctgctgcccagtccagagtgcagtgctgccatctcagctcactgcaacctccacctccgggttcaagtgattctcctgcctcagctggaactacaggtgcgcgccaccatgcctggctaattgttttgtgtttttggtggagacagggtttcaccatgttggccaggctggtctcaaacacctggcctcaagtgacctgactgccttggcctcccaaagtactgggattacaggcatgagccaccacgcctggcctgtacttctgttaaaattttttctatgtattttttttatcctattgcaaaatcaaattttttgttgataatatatggtcataaatttcatttttatatattggtctcatatcctaccaacttgctgaactagcttattagcactaactttttttggtagattccttaggatttgctgcatacaagattatgtcatctacaagtagagatagttttgtttcttcacttccaatctgggtggctttatgtttttttcttgcctgattacccagttagaacttccagaaaatgtcaggtacaattaacaactgcaaacatccttgtcttattcattttagaaagaaatttttagtttttcaccattaagtatgatactagttgtaggttttgtttaaaaaaagactgtgtcaagttcagaagttcccttctgttgctagtttgttgaataattttatcacgaaagggtgttgaacttttctcaaatgctgtggctacatctaatgaaatgatcatgcgttcttctcctttattctattaatatggtatattatattgattcatttttatacattagattaacattatatttctggaataaatcccacttggcctcagtgtgtattactttttatatattgctggagtctgtttgcaggtatttcattgaggactttcgcatctctgttgataaggtatactgatctttagttctcttgtgatatctttggttttggtgtcagagtaattctgagttcacaaaatgcattgggaaatgttcccttctctatcttttggaagagtttacaaaggattggtttaactcttttttaaatgtttgaggaaattctctacccctgggctttcctttgtgggaatttttaaacatttttaaaatagattatttttaaagcaattttagggtaaaagcacattgaatgaaaggcacagagcttccttaagtacatgctgcccctgtatgtgcatagcctccctcattatcaacatcctttaccagaatggtacatttgttgcagtcaatgaacctgcattgacaattgtcgatgaaagttcatagtttagagttcacctttggtgttatgtattctgtgagtctggatccatgtttaatgatactcattcaccattacagtatcattcagagtaatttcactgccttaaaagtcctctgtaccctacctatttttctctcctaccccactaacccttagcaaccaatgatctttttatctcaataattttgcctattccagaatgtcatatagttggaatgatacagtatatggagccttttcagactggtttttgtcacttagtaataagcttttaaattttccaccatgtcatgatcgttcatttcttttcagcattgaataatattccattgtctggtttatcacagttgatttatccattcacatagtgaaagacatcttagttgcttccaagttttgacaattatgaataaagctgttataaaagtatgtaggtttttgtgtggacaaaagttttcagctcctttgagtaaataacacagagcacagtagcttgattgacagtaagagtaagaaatattttttctcagtctgtgtcttattttttcattcacttgacagtgccatttgcagaacaaacagaaagttttaattttaatgaagtctaggttatcagttaattcatgaataatgtttttggtattgtatctaaaaagtcaacaccaaggtcatctatatgttctgtgttatcttccagaaattttatagttctgcattttacatttagggctgtgacccattttgcattaattttgcaaaagctataaagactatgtatagattcacttgtttgcatgtggagttgtccagttgttcccgtaccatttcttaaagactatctttgctttattgtattacctttgctactttgtcaaagatcagttgattataattaagtggtctgtttctggactctttattctgttccattgatatatttgtctagactttcaccaataccacactatcttgttaacttaggctttagagtaagtcttgcaatcatgtagtgtcagtcctctgacattgtttttctccttcagtattgagttggctattcttttgcctattactaagtaaaaaaagcagtctgaaaaggctatatatacagtcatttattggtcttttgcctcttgatataaactttaaaattactttgtcagtatcctcaaaatcttgcaggaattttgatagattgcactgcatttctagattgagttagaaatactgccatcttgacaatacacatcttcctatccatgaacatggaacatctctttcttggatatccttcattagaattttgcattttccccatatagaccatgtacatattagatttatacataaatatttcatttgggggggtgctaatggtaatgtatttttatctcagattctgcttgtacattgctggtatgcagaaaagtgatcaacttttgtatattaaacttgtttcctgcaaccatgttatataatcactttagatccagtttttttttttttggtcattctttcatattttctaggtgatcatgtcatctagcaaagacaacttctttctaatctgtataccttttattttcttgtcttaatgtattagctagcatttccagtatgatgttgaaaggcattggtgagaggcaacatacttgccttgttcctgatctcagcaggaaatcttcaattttatgttagctctatggttttgtagatattctttatttacattaaatatgttagctgtatggttttgtatatattctttatcaggttcaggtagttcccctcttttcctagtttactgagaggcttttgaaaatcattaatcagtgttggattttgtaaatactttttttccacctattgatattaccatatgatttttctttagcttattaacgaaatggattacattaattgattttcaaattttgaactagactggcatacctggagcaaatcccacatggttgtgatacattatttatgaatgcattcatggtcatggttgctattagtctgtagttatcttttattgtaaagactttggtgttggtattaaggtaatgctgccctcatagaataagttatgaagtattttctctgcttctgtcttaattgagattgtagagaattcatataatttcttccttaaaactttggtagaaatcagaatgaaccatctgtgtctggtactttgttttgaaaagttattgctgattcaatttctttcatagatataggcctatttagattattattttgcataaatattggtagttgtgtccttcaaggaattggtccatttcaccttgattattaaatgtgtgggcacatttgttcataatatttctttattatcctttgtttttgagacagggtctcactctggttgcccaggctggagtgcagtagtatgatctcagctcactgcagccttgacttcctgggctcaagtgatttacccacctcagcctcccaagtagctcggactacaggcacatgccaccatgcctggctaatttttttattattattagagatggagttttcctatgttgcccagtgtggtcttgaactcctggactcaagcaatctgcctgcctcagcctccaaagagtgatgggattgcaggcatgagccatcacacctagcctgatggcagaactttttaggaacaatagaatggtatatggcattttcaaaaattgttttcccctcctcctatggaagcatgaagggatttttctctagtattcattgtgagaacctcatctggctcctgaatgtagaaaactcacaaaactgtgaggaacctattatgactggatgcctttggagttgttcacactgaacctccagcaattcatcaattatatttcagattttcctatcccaacactggttcctacagaggtttctgctccagtaagctgtaattctttttatccatctgcttccttggttgtgagggcagtgattttccctgtgacctcatttctctgacagatctaagtagtcttgattacatcttttaacctgttgtaggtatattcagattttctatttcttcttcagtcaattttagtagtttgtgtttttctagaagtttgttctctagctctgctttagctccatccaataaaatatgagtatgtcgagttttcatttacaacaaggtattttctaatttctatcatgtttttttgattcctgactgtataggagtatatttttacctattacccaaatttgcttgttattcatgtataattttatcagaaaacacactttgcacaatttttgcagtgttacatttatttagacttgttttataacttgacatacagtccatcctggagaatgtttcacgtgtgcttgagaagaatgtgtatattcagctgttggtgggtggcatgttttatagatgtctgttagacctagttggtttatagtgttttttacaacttctgttttctttttaatcttctatctacttttagccattattgaaagtggattagtaaattatctatttattcctttaattctgccattttttgcttcatgtattttggtgctctgttgcttattacatgtatgtttacatttgttacatcattttaatggcttgaactttttattataaaatgtgtatatcttgtagatatcgtatagttaaatctttttaaaaattgatattgctagtctttgccttttaatttttcaatttatatacatttaacataattattgataaggtaggatttgtctgccattttgtctgtatcttgtctttttttgtgttcaatagatattttctagtgtactgttttaattcccttgtcttttactaaattttttgatgttcttaatggtttccctggggattacaactaacttataacagctagtctgaagtaataccaatttcattacaatataaggaaactttgttcccatatagctacattccctctttttactctgtgctattatacaaattacattttattttatgcccattaacacagattatgttttttcttttaaatcagattgatattgtcatttaaatcaaatatgagaaaaatagttacaaaaaaatacatatatgatttcatatttacctatgtaattatctttactggtgctctttaagttcttaggtgtatttgaggtactgtctagtgtcctttcctttcagcctgaagtatacatttagtattttttgtaggacatgcctgaaaacaataaactcttatttatcagagaatgtcctaatttattatataatacatttctgaaagatagttttgcaaaatacagaattcttggttggcagtctttttcttgtggttctatgtcattctactgccttctggtcttcattgtttctgatcagagatcagctattaatcttattgggaatcctgcatacatgataatcatacagttttcatgattttcttgtgttggctttcagcagtttggttatgatgtttatatgtatgcatatctttgggtttatgttacatggagttagttgagcttcttggacatgtagattgatgttgttcatcaaatttgagaagttttcggccattatttttcaaatattcttcctattctttattcttcatcctctactttggggacctgcattatgtctatgttggtatgctttatggtcttccacagatctctgaggttctgtttatgttttcatttttcagactgaataatctcaattgacttatcttcaagtccctttttcccctccttttcaactctgctattgaacccctctaatttttactgcagttattacactttcagctttagaattctatttaataatatctttttcttgagtttatctcatgtatttaataaaatgctgtagtcttactttagttatttaaatacagttttctttcattatttgggcatacatgaaatagctgacttaaagtctttgtccagtggcctaacatctggactttttcaggaatagcctctattgactactttataggggccatactttgtttctgtttctcttaattgtttagacattttaaactaatgtaatggctgagagcagtggctcgtgcctgtaatcccagcacgttgagaggccaaagcaggagcatcacttaagcccaggagttcaagactagcctgggcagcatagtgagaccctgtctctacaaaaataaaaataaataaaataatataatctggtaaatctgaaaatcagattctaccccctgcccagaatatgttactgtttctggtggttgttgtttatttctttttaactactcctataaagtttgtattgtttctcatagatagccatcgaagtctttgcttggttaacttagaggtcagctaaggattagacagaattccttaggtgcctgagatcaataagtcagtctttgacaaaggggtctgtatgtgtgttggggcatgcattcaacactcagccaggctatttgcagctctggattagcctttattccctgcttgtgcagagtctcaaggttagactgtggtgagagtttagggctttctgaggtcttttgtgggccctacagttgcatgtggctttctaaattcccaggaatatattttcaaagcctcctgtggatcatctcatttcccaggtaatttacttttaagcttttttagttatcttatgttttgctccagttattagctacacctgagtcagtgacaatattcaacagctgcctatgattatttgacaaatgcctctgtggaaaaggtggttcacactaggtgaactccaagttagataaagtaaagataaccttactagtgggatcttccaggaaactaccaaacaggtcaaataatgtaaggtctctgtgaatgggactttagagtatatccaaccagtctagagtatatccaaccaatctggcctcctctagtggcagcctggctgctgcttttcataataaatgtgggctgttttgatttgaaggctaccatagagctgtggggaaagttaaaataccacagagctcactcttctcactgaaatcctgtctttttttcccttgaacaaattctccctatattgctgcaagctttttgctaatttccagatctgaaaaagctgattctgacaatatttatcagtacttttattgcttttatggaggataaaattttcagagatccttattctgccatttttgctgacatgtgtaaagtgatcatttctaattgtaaaattccttttgcatttattagctggaatactttacaggacttttcctcatcaaccgttagttaccatttaatatagtttgtaagaatgatagaataaatgcatggcaagaatctttacttctcaaatttcagagattttgatgggaaattatatttagagatcacaatcagtgtctagatgtgctccctgctatggaggtgtcattacttttaggcttttttaatgggcaaatacatgaagtaattattttttagaaagaaaatctgagattaactcaaatcattaattcatactgatttttcctattcatagttgacagagtattattatcttttgttctgcttctcttgtacactgaaattcttggtttttgatattaacaattatttacttatatcacaatatacatacattaatttaaaaataatttacagtgctacctgaatattttttcttgtaagttgttttatctctctttgcttacttgtatgtttgtttattgtcattagaatgtatcaaactagggctataaagctgtaatactatattttagccagaaactaggacctagcactcaaatgcccatcaatggtagaataattcatcacatttttataagatggaatatggtactcaatgaaaatgaataaagtacaactacatgcagtgatttggatggatatcccaaacataatggaaaaagcacacacaaataagcttatattatataattccatatacctatgtatatatcaagtataaaagtaggcaaaacaagctactgatggtggcacacacctatagttccagctatttgggaggctgaggcgggaagatcacttgagcccagaagttcaggttcaacctgagcaacatagcaagaccccatctgtaaaaaagaaagcattattaacataaaaataggcagaactactatattcttagagaagttactgttagggagacagacagtgagtgactgaaaggcaaaatgaggggaaattccaggggatagtaaatattttgtttcttagtgtgggttctacttaactgggtattttccatttgtaaactgtaaaattatgtgcacttttctgtatgtgtattacattgcaataaaattgtttaaaagtcaattgaaatagttctgtgtgtggttatgccacagcttaatacagagttagattagacttcttttcaaactcattttgcatatagacacctataatatcagctgcacagcctatataatgctatccatagcaatgaatttggtcttttgatttttcaggagaacttgcgcctgtcaggggctggatccagaaacctgtggtgcctccttctcttttggttgttcatggagcatgtactacaatggatgtaagtttgccagaagcaagatcccaaggaagtttaagctgcttggggatgacccaaaagaggtttgtttacttcctgatgtataatcgctttatttttcatagagaattcattagcttagatgaagtgaacaatatgacatatcttggtaagctcttattaatcaaagtttttcccaaactgtagatacacactattttttaagttggcataataatcatattatgccaaaataatagataaaatttgagcaacaaaaacttcctctttggtcttttatgttaattccaaagttttaaaggggtgtcacttcattgttaaaactaaatgagaattggtgatgtttttcatattttgactctgaattatggaagttacataagtactacattcagaaaagaccatttttagtcacatttatgtgcaatgagattcaaataatttaaagtcactgtaatgaatgcatttaataaagtcactgtaatgaatgcatttaagtaactaaaacatttagattttaatataactctgtaatggaaataaatggacactaatttctcactgaagtcattggtttttgtcttgtctgtagaatacgtatttcttataatttgcaaattgataaatttaacaacttttgggtggcatgtagtctagagtatagatacttcttgacttatgaggagactacattcctataaatccgttgtaaaatgaaaatccatttaatacccccaataaacccatcctaaagtaaaaaaaaaacgaagccattataggtcagggactgtctccgtactaattgaatgatgagaaaacctcagtatatttagcatttagctatgaccacattttcagtcattctatacacttacaattatcttttgaatttcgaatacaattaaaatatttccatactatagatattataacattgatgagtccctttaaatgaagaatttgttaaccttattaagctttcacttactattatagtcacagttaataaagcaagtgcaaaaactcctgaaatcacagtataagttttttaaaggatgttttcaataattaaagtttacttaaatgtgcgagacatcatttcataagacaagaatatgaatattaataacttaatgaaaagtactgattttgcttgctgtcattttaattttctacagataactttttttttaaccactgttttatcaagtgataaatgtttatcactttcacgaggtttcatgtaaaccaaatccagaggataccaagtaacttattgcctctgttgggtaggagagctctgttcagaaacctcctcaccttctaaaatttacatctctgccaggtggttatgtctcacaactttttttttttagagaaatatcaatctgaaatgaagacttctaagtataaatggagcagctaaatatgatcacctaccattttttaacagtatattacttggaaaatctgttcttcatgagcagggcaggtgggggtgtaactgagcatttcccctttcaagtaaattctgcaaaggttttcatgtatcctgcattctagttctgaagcattttatccatatttgaagtgtccagtaaattttagttgctctatggagagatcattccaaattatttaaatactatctttataaacataaaatgtaaagattagaaatagacaaattaagctaaagaagttcttttaatagttcatcttccttggtagctaaaaaatgtgacctctttaagaccatacggcttaattcccctaaccctactcctggcacaggcttgtgtgtataaaatgcaaaatatctgcatgcagttagaaaatcaatcttatgaaaaaaacaaatagctagatatttactagcacatatgaaattaaatgatagtcatgttttaaagatgctttatttagtaataaaggcaccatatattgtgtttgggattcaaaatgtaaggggaataatctaactgatagtctcttttacatagagaaaatggacttagaatttaatatgtagaattattcactttatacaggaagagaaactggagtctcatttgcaaaacctgtccactcttatggcaccaacatataagaaacttgcacctgatgcatataataatcaggtaagtttaaataatcattggcagcaattgtaacaacttacttgttactaatgacctatgtccaaaaatatttttgaaacaatgatttttaaatattattctaacttttcctcttaattgttgaaaccactgcagtgttcagtttcgagtatataaaaattataccatacaaaagtacattttttttgtcttttagctgtaaagacatgcgcttctaaaagtcacaggctgttctatctactaatcttgttctcatatgaataattttgtttctgtaaacagactatggagattacatcaaaattatgtggcccaagctataggttctaactacctatttttactgcaagtctataagtataaatgagtattcataagaatttatagacttacaaatattcacataaagctatgcatatactaacattgtaagtatatatatttcggtccagatgtgtcagattttgctgatcttccttttttgtttgaccttgacttcatacaccaagcaaaaacattttttttttctattttacatgtgtattctaaactatagctagttaagacaggtagatgatttggtcagaaatctctcatcatgaaggcaaaaaactaaaatcttcactgtttcagtaacatcaacaacaaaagcattaagtgaaagtctattacaaactaaacactgtgtttagtcactgggaacataaaggtgagcagtgccatctctgtctgtctttaagaattccgtctttgctgggtacggtggctcacacctttaatcccaacactttgggaggccaaggcaggtggatcacctgaggtcaggagttctagaccagcctgatcaacatggagaaaccctgtctctactaaaaatacaaaattagctgggtgtggtggcaggcacctgtaatcccagctactcggaaggctaaggcaggagaatagcttgaacctgggaggtggaggttgcagtgagccgaagtcaaaccattgcactccagcctaggcaacaagagcgaaactccatctcaaaaaaaaaaaaaaattcatctttaactgggtgcggtagtttatgcctgtaatcccagctacccaggagaccaggagtctgaggctgcggtgagccatgattgcatcactgtgctccatcctgggtgacaaagatgacccagattctaaaaaaaaagcaaaaaacaaaagaattccttctttagtggagacagagacatataaaataaatagcaattttagaattacacagttccagctggaatagaagaatgtgcacatttctaaaaaaatttaaaaacaaaacccaaaagtagactagatgtcacaagcagccttagacgctaaataaagatctttgaactttattctgtaggtaaccattgggctgtttcaagtgtgtgttggggatggaagggtaaagtgatgtaattcgtattttgaaaaatttacttaaaagccaagtaagggaaatataacttaaatctatgtaagattagagagagaagaaagctattgcaatcattgggcaagagattttaaggacctaaagaaatggcaggaattaagtatgtacactaactaaggtggagcttagagaacttggtgactagatgtatggatgagaaaagaatttggagatacaacaaatttccagtttggacaggtagttctattaactagtatcagaaattggtaagaaatagtaagttttgggatggggagaagatatcaaaattttggacatgctaggcttctaggttaattagatggagaatcaggagaaaaattcaggctagcactgtagatttgagagtcagaatgctggcaggacttaaagttgaatacataggaatgaaaggaggttttcaaagtagagattataaagaggacaaagggctgatgatgggattctggagccatcaatcattttaggcatgagtggaggaagagaagccaatgaagtaagaactgggggagggagtagaagaaatgtagtaggaaaagtgaaagagggagatggatggatggaggaaagctggaatgatgagaagacacccagagcagagtatacaggagcaataggtatggggctctgggatgggtgctctgtcatttacttgataatattaaagactctcgtgggattagattagtttacacagcagacatggacaagggactaatcctaaaatgatttagctactcttcttttccactgtggactttaacgtcccaaacatttttttttttttttggttcgaacaatagaggcaaattaaacgatggtctatttgtaagttattttatgtcaaattatgtttttagaaatgtgtatgaatatctatgaaaagtttttaaacactattaatagttggattaatactgttattttgtttagctagtatcacaaagtataaggagtgctttgatactgtcgtaaaagtttaattctcagcaagaacttctgaaataaatcaagctataaaaataaataaatgaatgagtctatgttgctagatttaaagttgggtcattttctattaaatgaatttttaataggtgctgttaatcaaatggctttacttgaggcagaataacaaagcattgatgttctttttgctcccttgattcttattatggaccgtctcatacttgaaactattttatacatttcctaaaacttaagtacccaaaatatgaagccatcaaatatgttcaagttttaatatttatatatgaaaatgtgttgatgtaatgtctagataaattaagtcaattaatagttgtaaatggatgagatgcttctgaatggataaaatatttttatattgcatggtaggtactattggtaatattcatccatgtatgttaatatgctttagagatcaaaataatagccatgtgatgtttccacacagtacacgggaagaccatttgatgttatagatgctgtcataaaacctactatttgatctttacctcctttccccaactgagtgtcgtatctctatttctcacatctgaatattcttccttgctttattccttgatttcatgaagtcttattgctaaagtttagttggctctccacagcatctcttctgtcagtcccatggaattagagcttcagttttctcaacttaaatgtcctttcttcgtgtctatccagtagacatatatttggctctgtcttttctatgcctgccttacaatttaacagtagacctgaaatagcaggtgtcaatctcaaaatcgtgtgctatttatcatacatgaagatgacattttagacaaatgcttctaagagagctttctatgaagatggaaatattctctatttatgctgttcagtgtaataggcactagccacatgtggttattatttaacagttgatacgtggctagtgtaattgagtttaaattaatgtaaaaattaacacaaacagccacatgtggataatggttaccatagtgaacagcacaaccttagaccatgagaaagttatgcatttagaattgtcttccagacatttagatggatttccagtaattcattcacaaaatcctgcatggtattttttaggagatggcataagtgtaatttctagctgattgtatatctgtttttgttcaagaaacagaataaagctaactagaccacagcatgaactgaacggccacaaagcacacatctatgttaaagagtagttggtaccttcattttcctttggccaaagttttatgaggttagatagacaaatacatatatgaatccaacagtaaataatatgaagccaccacaaacttttatcctaatgcaagttcatcttctagccatgatggagtaaacagagactacatatgccgttacacatttaagaaaaaactgacaaaatatatgaaacaatggtttttagacatagaataagaaattcaagagacagtggcaccagagagaaaggaagtaaaaaggtgaacctataaataccccagtttacttcctgaagagagtattaggctccagtgtagccagtaggaacccaaacacacccagccttatctctgtattaaggagacaaagttcaaaatttggagaggccaaggtgacgagagttcactattcagaatatcagagaggagagagtgttattgagaaaagctccagagacctgcagagggttctgatccagtcttcagctgagtattaaacagcacatgcatgtgaaaaaactgccaaggctaggtagggaaagaaccatcagaagaagcaggcagaataatcccttgatctcacacaggacctggaatagttcttgatcataccagccagacggagaagacttcataatactattcataattgtattgccttggtagtagaagtaaatttggcagttctgacctcatctaaaaatgcttaaaatgaaaacatagaagggccaaactgattctaagtaatttaactgcatcacagtacaaaaattaaaaaaaaaatctaccaacaaggtaaaatttatagtctagcattccatcagaaaatacaaggcatacaaagaaaaaagaaaatataacctttactggggaacaggcagaaatcaatcaataaaaatagtcccagaactgacatatgtgatacaatatgtaaataagttcattaaaatggctatcatatttcatatgttaaaatgccagaggaaagcatgagagtgataaggaaagatcagaagatattaaaataccctacaatgaccttctagaagtgaaaaatatatatctagattaaaaatacactaggcggaattaacagattaaggaacttgaagacatagtaatagaaatttttcagtataaagaaaaaactgaaaaaaatgaatatataaaagacctattagccaatattgttacactaatatatgtgtaattggagtaccagaaggaggtgggagacagaaaaatatttaaagaaacaatggccaaatttttttcagatttgttcaaaactgtgaacccacagatctcagcagctcagcaaaccccagattaaaaaacaaagacataaaaaaagactatcaaaaatttataatcaacttgcttacaatctgtgataaagagaaactcagaaaggcaaatggagaaaaaaggacatattacactaggtgggaaaaaataagacaggagacttcattcagaaaaaggcaagagagaagatgtaagagaaacatctttaacatactaaaagaaaaaagactctccacccagaaatatataaccaatgaaaacaactctcaaaaaagacagcaaaataaagaatattttttcagacatacatacaaaagctgaaagaattcaccaccaacaaactagcactttaaaaatgttaaacgaaatccttcaggaagaaagaacatgataccagacagaaatccagatcaacataatgaaatgaacagtatcaaaaatagtaaacatggttaaaagacttttaaaaaaatgataacttgctatcttaaaaatatattaacaatgtattatgaggtttataacacgtagaagtagcacagaggctgaggaattgaaagtatattattgtaaagtacttatacgatatgtggactgggtatattacttggctgtaaactgtgagacgttagagtacactgtgtaccttaaaccactaaaaaaaaaaaaaaaagtatatagctaatcagccagtaaagacagaaaaatgaaatcaatccaaaaatgtttttaaaaatatataggaccaaaaaaagataaatataaaaataaaacaaatagcaagatggtttatttaaacccaactgtatcaacaaccacattaaatgtaaatggttttaacacccctaattataaggcagagcttgtgatattgaaaaaaaagcaaaaaccaagaaaaccactttaaatataaagatacaaataaattaaaaagatatttttaacataaaaaatgatgttgaaaagacataacaggaaaaaatatgattattgcagtaggtacagaaaaaccatttgataatattcaacattcataaaaggaaactttctcaacctattaaatacataaatggaaagccaaaagctaatgctatacttagtggtgaaagactaatacttgacccctaagataaggaacaagacaacaatgtccatttttaaccaactgcttctattcaacatcaaactgtaaattttagaaagtgcagtaaggcaataaataaagcagtcaagattgggtaggaaaaaataaaactgtacttatttgcagatgacatgtttgtctacataagaagtctcaaaaaatctaccagaaaatgaaattaatatatgaatttagcaaagttgtgaaatacaaaattcaagtgtatttttatatactagcaataaataaatcaaaataaaccattaaaatagcatcaaaatataaaattcttagacatacatttgacaaaaatgtataagattatatactggaaactaaaacattgctgagataaattatagaaaacttcagtaactggagagatacactatgttaatggatcaaaagactaaatattattaagatgtcagttctccccaaactaatcaatatgttcaatacatgatgtttcaaaaccccagcaggttttttgaaagaattggacaagatggctgtaaaatatatatacttggaaatgcaaaggacttggaatagtcaaataatattttaaaataagggcagaatttgagactatatattgcatggttttcagatttactgaaatctataattgctactgtctgtcaagacagtttgatattgcccaggcgcagtggctcacgcctgtaattccagcactttcggaggccgaggtgggtggatcacttgaggccaggagttttgagaccagcctggccaacatggcaaaactctatctctaataaaaatacaaaaaattactggggcatggtggcgcgtgcttatagtcccagctgcttgggaggttgaggcctgagaatcgcttgaatccaggaggcagaggttgcagtgagcccagatcgtgccactgcactccagcctgggtgacagagtgggactctgtctcaataaataaataaaatttttaaaaagtttgatattgacatacctacatacacaccattatacacaagtggatcagaatagagaatccttaagtagacccaacatatataatatggtcaattgatttttaacaaagatgattcaattgggaagggataaccattttatccagtagtatctgaacagttggaaagccataagggaaaaaaggtaatcttgacccttaatttcacaccatttataaaaattaactccaaataaatccatttatatgaaattctagaaaatgaaaatctgtagtgatagattagtagttgtctgagaacaaagcaggaagcatgaattatacaggggcatgaggaaatttttaagagtaatgaatatgtactttattttggttgtgacaaatatatatcaaaactcaaatagcatactttatggcctcaataacactataaaataaaaattttaccatgtcaagatatttgctctattttgtgtcattccattttgtttctggatatatatttaagttcaaaacatttttttaaagttctaaatggtctaaatactagtgagttttcggtgtaagagtaaaactaactactttcgcattcacacacacttttatttttcagattgaatatgaacacagagcaccagagtgccgtctgggtctgaaggaaggccgtccattctcaggggtcactgcatgtttggacttctgtgctcatgcccacagagacttgcacaacatgcagaatggcagcacattggtaagttgggctgaggacagcttagcagctgttgagtctgttctcacactgctaataaagacatatgcaagactgggtaatttataaaggaaagagatttaattgactcacagttccacatggctgtggaggcctcacaatcatagctgaaggcaaatgaggagcaaagtcacatcttacatggcggcaggcaagagaacatgtgcaggggaactcccctttataaaatcatcagatctcatgagacttactctcctgagaacagcatgggaaagatctgcccccatgattcaattacctcccactgggtccttcccaaaacacatgggaattttgggagctacaattcaagatgagatttaggtagggacacagccagaccatatcagcagcatctcatgttgaggagcagaacactggaatttagtagcattcggttagagtaatatgttgtctgcaggtttcactggacagcaatattttcatgaatgaattcctgttgcaaagtgacctgctttggcataactagcactctcatgataggttggcacattagtttcctgtcaattgtgttgacaagcacatgagaatcatggaaatccttggtgttaatctaaaccagtgactatgcattgccagttacagttaacttccaggaaaatctcaaaattcagtgccagttacctggtagattgtaatcagttaagcaaaaagccaaatacaagccattcaccttacagagagagaagcatattcaccttacagagagagaagcataaatgagaaacacatcatcattgtcacagtaactgtggtaacctattgtaaaagattcacagtgcaaaagagcctgactacatattacagtgggtaaaatggatcggtcttgtaattggaggcagtggtgaggggaaaatagatacatgttatatatatatatatatatatatatgttctataccaacaaagggttcagggtataattttgcatgtaaaggggtgacccagagtagagataaagaacaaaatattctgttgaaaaaactatgaatcaatcaacctaatgaattatcaacatggatgtaggtgtagttgaagaagatggtcagtgagaatatggaaacagatatcaggaattaaagtcatattctagggcagaaaagcattcatggaggtattagatgatagctgaagtaatttgaagaagctggtgtgaagtttttgttgagaagcagagaagatattaatttaatgttctagatcagagattggaaaactcttctctataaagggcaagatggtaaatattttagggactgcaggccacataggatttctgtcacattgtttggtggggtttttttgtttattttgttttttaaaaactccttgaaaatgtaaaaaccattcttagtttactggccatacaaacacaagctgtgaggcacattagccgtaggttctggtttcctaacttctgatccagaagaacaaacacaaggcctaccaaccaccccaacatctaaaatcatcactaatcatgtactcagcacctgctcattattaggaggctatgctagtttctgaaaagcagaagtagtaaatgataactggggctatagtgcatcctaatataaccatgtttcattccaggaaggtgacagagagtaagatgatgagaaggatgtttagaatcaagaagaatttgcctctgatagagcatgggttctgtgaagtaaaatggaaaggagcactagataagaactgaatagggttaaatatgtatgggaaaagtaacaaggtgctcagagacatgaatttgaagacttctgtgcagaaagtgacaggctcattaataccatctcatgttgaagttatttctaaagtcagtccattgtgatcacatttctctcaagaatatcttctaattttattttagatcacattagatcacattgtctccattgatcaaaaacactaaatactaaaaagttagtatttaaaaaccacaaataatcttttaccaaagctagtgtaattgtagtaactaaagcaaaaagtaccatttaattatcaaagcaacagaggtagctttcctccctccaccccttacccttttcagagtacccacttatatggtcatatttcagaaaagaaatgaagaaaagagaaagttaggtttgacagagtacaaaggaggagagacaagagagtgaaaatagtattaagttgcatattacctgtatcagccaaatctttaccttttcattttttatatttttacttcagttatcttatggaaatttcttaaacagagagagttaggtgtcaggtatgtgaaaagacatgaaatttgtgttcagaagtatgagatgaggcaaatgtgatactaccaaaaacagaggaagtcatttcgtagaaaaaacttttagcctgtttttgaagaggcttcacatctagcacatctatttttgaagtgtgaaaagcaagagagtgcttcattttgggggagtgttgcttcttcccatagacagaaacatatgtgaagaacaagggtcaccacagctaactgttcctgatagactcagagaaagggtgggtgggcaatgtcaatttgtcttatctccctgtaccattttgttgctattttcattaataacaggtaggatggttttatggtaatatatatgtcactgatctggatcaactaggccaccaacacaaatctgaatactgagaggagaaagatacacacacacacacacgttttctttgggacctgtagttgaggctgtaatgtcttacttccctaccaggtatgcactctcactagagaagacaatcgagaatttggaggaaaacctgaggatgagcagcttcacgttctgcctttatacaaagtctctgacgtggatgagtttgggagtgtggaagctcaggaggagaaaaaacggagtggtgccattcaggtactgagttcttttcggcgaaaagtcaggatgttagcagagccagtcaagacttgccgacaaaggaaactagaagccaagaaagctgcagctgaaaagctttcctccctggagaacagctcaaataaaaatgaaaaggaaaagtcagccccatcacgtacaaaacaaactgaaaacgcaagccaggctaaacagttggcaggtaaatttaatgtaaagcatttgtagataaatgtgttgtgtggtatattaaaaatgaaaattattttggttttgcccccatcaacttgtaagttctggggtacacatgcaggatgtgcaggtttgttatacaggtaaacatgtgccatggtgatttgctgcacagatcaacccattacctaggtattaagcccagcatcttcctgatgcacccctaccaataggcgccagtgtgtgttgtccccactcccccaccatgtgtccatgtgctcttattgtaaaatgaacattgttaattttggaaagttatatcaatcatggtcttagttctgtgccagagtcttctctaaagtagcaagggccaggctttgttctcagagatggtaatgagatattgcaccatcaacatggaaaacatggaaaagtctggattttattctataataaacagcaactttttttaacaggtaagtgatacgatgaaattcattgtaatttggcagtaggccaaattagtagaggagctaatagtttggagataaacacagtaaaccagaactgaggtaacaagaccttgaattttgttggttagtagcaaagatatagcaaaatgatgcaaatgagctcttccaaaatgggaaaaagaaaatacattggtgacaaaacactggaatgaaagagaagaaaagtttaaagatgaccccaaagttttaaacctaaacttaacctactgttttaggtttctaaaacagtactatttattgaaataagtaagtttgaaaatatgattgagagagagagaggggagaatgaaacatttttccttagacatgttgagtctgtggtttaggaggggttctacatgtagattatgctacaaaacttttacccatcaaaatagattacagctgtagtaataacaatagaacattattcatgaatactaagttattgtctttccatagcctcctgctttatgtctgcagtttgtaaaaagaaaaaaaatccaaaatttgggatggtattggcctggccattaacaaaagcaaaccagtttgcttaaaactagccatctttgctgcttcatgaagtcaaatttctctactgattcatttccaagctcagaggaactaagttaaataatttagaatatgctaaagatgcttgataagtgtttattgactggttgacttaacactaagtaaatactgttcacttaggttagctgtgaaatataattagatagaaccttgtctctgctcccttttaactggcttctgcaggtaataatcccttctgttctcagaactgccattgcagtttcatctatttgttcttaactcatatgactttttaaagtgaggtcaaaacagaagtatgacttttaaaagtttcatttacaaagctgaaagtttctttaaagtgttatctacaactgtgttaacttcctttctggaaagcctgcttataaagtagcacttgttgattatataagatgctttttgtgtttaaatacgtgtcattcttttttttcacaacattcccgaatcttacataataaatcttattttaattatttagcaaattccattgcatgccaggcaatgaagaagtaagtaaaataaaacattttccttcccatttaggaatttacttaccagtgggggtgaagagagggctaaaaacataactataatacattgtgagtattgctttatcagatctatctttgcagttgagtattacaaaagcactagaagatgaggtcaaagcggtcccttgaggaagggatgactacaccaaggaaggatagggagagagggaggaaaagggaggcacttcaagcagaggcatgttcagaagttccaaagaacattttgctctcaatggaatggctttggatgtttattacattttttttttcactaagttttgtatttctaatgccttagacaaaaaattgtgctggacaatgatcagaaccctgactttgctcttatctttgcttaatgggtgtcgtatatcactagtggagtttcttacctacatttaagtatcctcactagccttcataaaataatcatcaacatcaaagatacctgtttctgttctctcttaccctgtccacagaacttttgcgactttcaggaccagtcatgcagcagtcccagcagccccagcctctacagaagcagccaccacagccccagcagcagcagagaccccagcagcagcagccacatcaccctcagacagagtctgtcaactcttattctgcttctggatccaccaatccatacatgagacggcccaatccagttagtccttatccaaactcttcacacacttcagatatctatggaagcaccagccctatgaacttctattccacctcatctcaagctgcaggttcatatttgaattcttctaatcccatgaacccttaccctgggcttttgaatcagaatacccaatatccatcatatcaatgcaatggaaacctatcagtggacaactgctccccatatctgggttcctattctccccagtctcagccgatggatctgtataggtatccaagccaagaccctctgtctaagctcagtctaccacccatccatacactttaccagccaaggtttggaaatagccagagttttacatctaaatacttaggttatggaaaccaaaatatgcagggagatggtttcagcagttgtaccattagaccaaatgtacatcatgtagggaaattgcctccttatcccactcatgagatggatggccacttcatgggagccacctctagattaccacccaatctgagcaatccaaacatggactataaaaatggtgaacatcattcaccttctcacataatccataactacagtgcagctccgggcatgttcaacagctctcttcatgccctgcatctccaaaacaaggagaatgacatgctttcccacacagctaatgggttatcaaagatgcttccagctcttaaccatgatagaactgcttgtgtccaaggaggcttacacaaattaagtgatgctaatggtcaggaaaagcagccattggcactagtccagggtgtggcttctggtgcagaggacaacgatgaggtctggtcagacagcgagcagagctttctggatcctgacattgggggagtggccgtggctccaactcatgggtcaattctcattgagtgtgcaaagcgtgagctgcatgccacaacccctttaaagaatcccaataggaatcaccccaccaggatctccctcgtcttttaccagcataagagcatgaatgagccaaaacatggcttggctctttgggaagccaaaatggctgaaaaagcccgtgagaaagaggaagagtgtgaaaagtatggcccagactatgtgcctcagaaatcccatggcaaaaaagtgaaacgggagcctgctgagccacatgaaacttcagagcccacttacctgcgtttcatcaagtctcttgccgaaaggaccatgtccgtgaccacagactccacagtaactacatctccatatgccttcactcgggtcacagggccttacaacagatatatatgatatcacccccttttgttggttacctcacttgaaaagaccacaaccaacctgtcagtagtatagttctcatgacgtgggcagtggggaaaggtcacagtattcatgacaaatgtggtgggaaaaacctcagctcaccagcaacaaaagaggttatcttaccatagcacttaattttcactggctcccaagtggtcacagatggcatctaggaaaagaccaaagcattctatgcaaaaagaaggtggggaagaaagtgttccgcaatttacatttttaaacactggttctattattggacgagatgatatgtaaatgtgatcccccccccccgcttacaactctacacatctgtgaccacttttaataatatcaagtttgcatagtcatggaacacaaatcaaacaagtactgtagtattacagtgacaggaatcttaaaataccatctggtgctgaatatatgatgtactgaaatactggaattatggctttttgaaatgcagtttttactgtaatcttaacttttatttatcaaaatagctacaggaaacatgaatagcaggaaaacactgaatttgtttggatgttctaagaaatggtgctaagaaaatggtgtctttaatagctaaaaatttaatgcctttatatcatcaagatgctatcagtgtactccagtgcccttgaataataggggtaccttttcattcaagtttttatcataattacctattcttacacaagcttagtttttaaaatgtggacattttaaaggcctctggattttgctcatccagtgaagtccttgtaggacaataaacgtatatatgtacatatatacacaaacatgtatatgtgcacacacatgtatatgtataaatattttaaatggtgttttagaagcactttgtctacctaagctttgacaacttgaacaatgctaaggtactgagatgtttaaaaaacaagtttactttcattttagaatgcaaagttgatttttttaaggaaacaaagaaagcttttaaaatatttttgcttttagccatgcatctgctgatgagcaattgtgtccatttttaacacagccagttaaatccaccatggggcttactggattcaagggaatacgttagtccacaaaacatgttttctggtgctcatctcacatgctatactgtaaaacagttttatacaaaattgtatgacaagttcattgctcaaaaatgtacagttttaagaattttctattaactgcaggtaataattagctgcatgctgcagactcaacaaagctagttcactgaagcctatgctattttatggatcataggctcttcagagaactgaatggcagtctgcctttgtgttgataattatgtacattgtgacgttgtcatttcttagcttaagtgtcctctttaacaagaggattgagcagactgatgcctgcataagatgaataaacagggttagttccatgtgaatctgtcagttaaaaagaaacaaaaacaggcagctggtttgctgtggtggttttaaatcattaatttgtataaagaagtgaaagagttgtatagtaaattaaattgtaaacaaaacttttttaatgcaatgctttagtattttagtactgtaaaaaaattaaatatatacatatatatatatatatatatatatatatatatgagtttgaagcagaattcacatcatgatggtgctactcagcctgctacaaatatatcataatgtgagctaagaattcattaaatgtttgagtgatgttcctacttgtcatatacctcaacactagtttggcaataggatattgaactgagagtgaaagcattgtgtaccatcatttttttccaagtccttttttttattgttaaaaaaaaaagcataccttttttcaatacttgatttcttagcaagtataacttgaacttcaacctttttgttctaaaaattcagggatatttcagctcatgctctccctatgccaacatgtcacctgtgtttatgtaaaattgttgtaggttaataaatatattctttgtcagggatttaacccttttattttgaatcccttctattttacttgtacatgtgctgatgtaactaaaactaattttgtaaatctgttggctctttttattgtaaagaaaagcattttaaaagtttgaggaatcttttgactgtttcaagcaggaaaaaaaaattacatgaaaatagaatgcactgagttgataaagggaaaaattgtaaggcaggagtttggcaagtggctgttggccagagacttacttgtaactctctaaatgaagtttttttgatcctgtaatcactgaaggtacatactccatgtggacttcccttaaacaggcaaacacctacaggtatggtgtgcaacagattgtacaattacattttggcctaaatacatttttgcttactagtatttaaaataaattcttaatcagaggaggcctttgggttttattggtcaaatctttgtaagctggcttttgtctttttaaaaaatttcttgaatttgtggttgtgtccaatttgcaaacatttccaaaaatgtttgctttgcttacaaaccacatgattttaatgttttttgtataccataatatctagccccaaacatttgattactacatgtgcattggtgattttgatcatccattcttaatatttgatttctgtgtcacctactgtcatttgttaaactgctggccaacaagaacaggaagtatagtttggggggttggggagagtttacataaggaagagaagaaattgagtggcatattgtaaatatcagatctataattgtaaatataaaacctgcctcagttagaatgaatggaaagcagatctacaatttgctaatataggaatatcaggttgactatatagccatacttgaaaatgcttctgagtggtgtcaactttacttgaatgaatttttcatcttgattgacgcacagtgatgtacagttcacttctgaagctagtggttaacttgtgtaggaaacttttgcagtttgacactaagataacttctgtgtgcatttttctatgcttttttaaaaactagtttcatttcattttcatgagatgtttggtttataagatctgaggatggttataaatactgtaagtattgtaatgttatgaatgcaggttatttgaaagctgtttattattatatcattcctgataatgctatgtgagtgtttttaataaaatttatatttatttaatgcactctaagtgttgtcttcctgaagtttttttagtgcttgaatgactgccacctcaatgaagaaaagggaataaaaaataatttttaaagacacttttaagatagatagttagtcttatgttaaactatatctaagataatacccaaataattaaggccgaagtatttctctggttaaatggtgtagatattcactcacttttccttccaactaacttgttagtgtattcactttgcatgtgtagacagtgtaaatcagatagagagtaaagcacctctaatcttagattgccccctccagtgttttgtgaagggtttcagtgatatagcaggtgcactaaggttgaattcatattgcttagaactaaggccaactctgttttcagactctcaccttccacttcttgcctactcttcttaagggaagatacttcttcctgtacatcagaaaggcagggtggtaggctggaggaatggggagaggaggcctggaaggtatcagacaaatatacttgtcctcatctagtcccacatggcttcaaggagcttgaggctaaatcatcctcatctctacccattctctgccatgtgaatcatcccatatataatatcagtgcactccagctgaaacacttcctagaaccacaagatgctaaacaatagttgtgggaatcttccagccctccattccttcccaaattggcagagaaatcattttcatcatgcatgaagtaaaggaattccctttctcacatttctctctgttcagcctgggccaaatctgattcaaatagtgcaacccaggaaatgactaccatttagtaacctctgagcttattgactgggagattcctccaggactctgcaagccaggatattaagagaagccacaacatcactgttaaaacacaatgatctaatgacttggcttttgttttaatttcaaccctctgagcacattgtcaaccctcatttcaccatccatcatctggctgaaccttgggaacctcccactccacatttgcaagtctccactgcccagggcagggagaattttagactccacaagctcaaaagcctttcctgctagagccccattctgctaggatctctactagtggaggctggtgatgctagcacaccataaatgaacgtgtgggaaggcctgctgcttctgagcctgcaggtggacttgaacaggggaaacagctggaaatgacagatgagccagcattcacaaagctttattggccccttgcctctcctggaaagacataacaaggccaaaccttttcttgtaggcacacacagctgccctgtcacacagtaccacccgtttcttcctcactttttttcagttggtttatcataaaaatccttccactatgggtaattctagcttatctttgagtcctgcctgattccactgcccagcactcatcggctgtgtaagagccagacttagcgagaaaagtcatttttcaacaaggcacctaatccgtagagtgtggggaattttagattgattttgttggtttaaaggccatctggaggcgagtatcaaaaaaagaaaaaagggtgtggggaagcatcttttcttcccttaattgatttgagggaagtgcttgtttcatgaagacacttgtttattaacttcaatcacccaacttatccgtaaggcgtcagggactttatcttccccacccccattgcccccctcccccaatacactcacagttgttgaaagaatgaaaaagtgttcacaaaagatgcttagaattaactcatttatgttattttggttttactaggagaattgtttcaaagaacgaagatgcttttgttcccatatattagaggctacctgcctaaattctctctaaccaggtagtttctcacaaacttccttggttttctcatccaacattcactctttaaaagagccacactttccctcacatatatactcaacaaatatagttttttggagggatttctttttatgctg

SEQ ID NO: 67 - DNA, 9796 bp, Homo sapiens
ggcagtggcagcggcgagagcttgggcggccgccgccgcctcctcgcgagcgccgcgcgcccgggtcccgctcgcatgcaagtcacgtccgccccctcggcgcggccgccccgagacgccggccccgctgagtgatgagaacagacgtcaaactgccttatgaatattgatgcggaggctaggctgctttcgtagagaagcagaaggaagcaagatggctgccctttaggatttgttagaaaggagacccgactgcaactgctggattgctgcaaggctgagggacgagaacgaggctggcaaacattcagcagcacaccctctcaagattgtttacttgcctttgctcctgttgagttacaacgcttggaagcaggagatgggctcagcagcagccaataggacatgatccaggaagagcagtaagggactgagctgctgaattcaactagagggcagccttgtggatggccccgaagcaagcctgatggaacaggatagaaccaaccatgttgagggcaacagactaagtccattcctgataccatcacctcccatttgccagacagaacctctggctacaaagctccagaatggaagcccactgcctgagagagctcatccagaagtaaatggagacaccaagtggcactctttcaaaagttattatggaataccctgtatgaagggaagccagaatagtcgtgtgagtcctgactttacacaagaaagtagagggtattccaagtgtttgcaaaatggaggaataaaacgcacagttagtgaaccttctctctctgggctccttcagatcaagaaattgaaacaagaccaaaaggctaatggagaaagacgtaacttcggggtaagccaagaaagaaatccaggtgaaagcagtcaaccaaatgtctccgatttgagtgataagaaagaatctgtgagttctgtagcccaagaaaatgcagttaaagatttcaccagtttttcaacacataactgcagtgggcctgaaaatccagagcttcagattctgaatgagcaggaggggaaaagtgctaattaccatgacaagaacattgtattacttaaaaacaaggcagtgctaatgcctaatggtgctacagtttctgcctcttccgtggaacacacacatggtgaactcctggaaaaaacactgtctcaatattatccagattgtgtttccattgcggtgcagaaaaccacatctcacataaatgccattaacagtcaggctactaatgagttgtcctgtgagatcactcacccatcgcatacctcagggcagatcaattccgcacagacctctaactctgagctgcctccaaagccagctgcagtggtgagtgaggcctgtgatgctgatgatgctgataatgccagtaaactagctgcaatgctaaatacctgttcctttcagaaaccagaacaactacaacaacaaaaatcagtttttgagatatgcccatctcctgcagaaaataacatccagggaaccacaaagctagcgtctggtgaagaattctgttcaggttccagcagcaatttgcaagctcctggtggcagctctgaacggtatttaaaacaaaatgaaatgaatggtgcttacttcaagcaaagctcagtgttcactaaggattccttttctgccactaccacaccaccaccaccatcacaattgcttctttctccccctcctcctcttccacaggttcctcagcttccttcagaaggaaaaagcactctgaatggtggagttttagaagaacaccaccactaccccaaccaaagtaacacaacacttttaagggaagtgaaaatagagggtaaacctgaggcaccaccttcccagagtcctaatccatctacacatgtatgcagcccttctccgatgctttctgaaaggcctcagaataattgtgtgaacaggaatgacatacagactgcagggacaatgactgttccattgtgttctgagaaaacaagaccaatgtcagaacacctcaagcataacccaccaatttttggtagcagtggagagctacaggacaactgccagcagttgatgagaaacaaagagcaagagattctgaagggtcgagacaaggagcaaacacgagatcttgtgcccccaacacagcactatctgaaaccaggatggattgaattgaaggcccctcgttttcaccaagcggaatcccatctaaaacgtaatgaggcatcactgccatcaattcttcagtatcaacccaatctctccaatcaaatgacctccaaacaatacactggaaattccaacatgcctggggggctcccaaggcaagcttacacccagaaaacaacacagctggagcacaagtcacaaatgtaccaagttgaaatgaatcaagggcagtcccaaggtacagtggaccaacatctccagttccaaaaaccctcacaccaggtgcacttctccaaaacagaccatttaccaaaagctcatgtgcagtcactgtgtggcactagatttcattttcaacaaagagcagattcccaaactgaaaaacttatgtccccagtgttgaaacagcacttgaatcaacaggcttcagagactgagccattttcaaactcacaccttttgcaacataagcctcataaacaggcagcacaaacacaaccatcccagagttcacatctccctcaaaaccagcaacagcagcaaaaattacaaataaagaataaagaggaaatactccagacttttcctcacccccaaagcaacaatgatcagcaaagagaaggatcattctttggccagactaaagtggaagaatgttttcatggtgaaaatcagtattcaaaatcaagcgagttcgagactcataatgtccaaatgggactggaggaagtacagaatataaatcgtagaaattccccttatagtcagaccatgaaatcaagtgcatgcaaaatacaggtttcttgttcaaacaatacacacctagtttcagagaataaagaacagactacacatcctgaactttttgcaggaaacaagacccaaaacttgcatcacatgcaatattttccaaataatgtgatcccaaagcaagatcttcttcacaggtgctttcaagaacaggagcagaagtcacaacaagcttcagttctacagggatataaaaatagaaaccaagatatgtctggtcaacaagctgcgcaacttgctcagcaaaggtacttgatacataaccatgcaaatgtttttcctgtgcctgaccagggaggaagtcacactcagacccctccccagaaggacactcaaaagcatgctgctctaaggtggcatctcttacagaagcaagaacagcagcaaacacagcaaccccaaactgagtcttgccatagtcagatgcacaggccaattaaggtggaacctggatgcaagccacatgcctgtatgcacacagcaccaccagaaaacaaaacatggaaaaaggtaactaagcaagagaatccacctgcaagctgtgataatgtgcagcaaaagagcatcattgagaccatggagcagcatctgaagcagtttcacgccaagtcgttatttgaccataaggctcttactctcaaatcacagaagcaagtaaaagttgaaatgtcagggccagtcacagttttgactagacaaaccactgctgcagaacttgatagccacaccccagctttagagcagcaaacaacttcttcagaaaagacaccaaccaaaagaacagctgcttctgttctcaataattttatagagtcaccttccaaattactagatactcctataaaaaatttattggatacacctgtcaagactcaatatgatttcccatcttgcagatgtgtagagcaaattattgaaaaagatgaaggtcctttttatacccatctaggagcaggtcctaatgtggcagctattagagaaatcatggaagaaaggtttggacagaagggtaaagctattaggattgaaagagtcatctatactggtaaagaaggcaaaagttctcagggatgtcctattgctaagtgggtggttcgcagaagcagcagtgaagagaagctactgtgtttggtgcgggagcgagctggccacacctgtgaggctgcagtgattgtgattctcatcctggtgtgggaaggaatcccgctgtctctggctgacaaactctactcggagcttaccgagacgctgaggaaatacggcacgctcaccaatcgccggtgtgccttgaatgaagagagaacttgcgcctgtcaggggctggatccagaaacctgtggtgcctccttctcttttggttgttcatggagcatgtactacaatggatgtaagtttgccagaagcaagatcccaaggaagtttaagctgcttggggatgacccaaaagaggaagagaaactggagtctcatttgcaaaacctgtccactcttatggcaccaacatataagaaacttgcacctgatgcatataataatcagattgaatatgaacacagagcaccagagtgccgtctgggtctgaaggaaggccgtccattctcaggggtcactgcatgtttggacttctgtgctcatgcccacagagacttgcacaacatgcagaatggcagcacattggtatgcactctcactagagaagacaatcgagaatttggaggaaaacctgaggatgagcagcttcacgttctgcctttatacaaagtctctgacgtggatgagtttgggagtgtggaagctcaggaggagaaaaaacggagtggtgccattcaggtactgagttcttttcggcgaaaagtcaggatgttagcagagccagtcaagacttgccgacaaaggaaactagaagccaagaaagctgcagctgaaaagctttcctccctggagaacagctcaaataaaaatgaaaaggaaaagtcagccccatcacgtacaaaacaaactgaaaacgcaagccaggctaaacagttggcagaacttttgcgactttcaggaccagtcatgcagcagtcccagcagccccagcctctacagaagcagccaccacagccccagcagcagcagagaccccagcagcagcagccacatcaccctcagacagagtctgtcaactcttattctgcttctggatccaccaatccatacatgagacggcccaatccagttagtccttatccaaactcttcacacacttcagatatctatggaagcaccagccctatgaacttctattccacctcatctcaagctgcaggttcatatttgaattcttctaatcccatgaacccttaccctgggcttttgaatcagaatacccaatatccatcatatcaatgcaatggaaacctatcagtggacaactgctccccatatctgggttcctattctccccagtctcagccgatggatctgtataggtatccaagccaagaccctctgtctaagctcagtctaccacccatccatacactttaccagccaaggtttggaaatagccagagttttacatctaaatacttaggttatggaaaccaaaatatgcagggagatggtttcagcagttgtaccattagaccaaatgtacatcatgtagggaaattgcctccttatcccactcatgagatggatggccacttcatgggagccacctctagattaccacccaatctgagcaatccaaacatggactataaaaatggtgaacatcattcaccttctcacataatccataactacagtgcagctccgggcatgttcaacagctctcttcatgccctgcatctccaaaacaaggagaatgacatgctttcccacacagctaatgggttatcaaagatgcttccagctcttaaccatgatagaactgcttgtgtccaaggaggcttacacaaattaagtgatgctaatggtcaggaaaagcagccattggcactagtccagggtgtggcttctggtgcagaggacaacgatgaggtctggtcagacagcgagcagagctttctggatcctgacattgggggagtggccgtggctccaactcatgggtcaattctcattgagtgtgcaaagcgtgagctgcatgccacaacccctttaaagaatcccaataggaatcaccccaccaggatctccctcgtcttttaccagcataagagcatgaatgagccaaaacatggcttggctctttgggaagccaaaatggctgaaaaagcccgtgagaaagaggaagagtgtgaaaagtatggcccagactatgtgcctcagaaatcccatggcaaaaaagtgaaacgggagcctgctgagccacatgaaacttcagagcccacttacctgcgtttcatcaagtctcttgccgaaaggaccatgtccgtgaccacagactccacagtaactacatctccatatgccttcactcgggtcacagggccttacaacagatatatatgatatcacccccttttgttggttacctcacttgaaaagaccacaaccaacctgtcagtagtatagttctcatgacgtgggcagtggggaaaggtcacagtattcatgacaaatgtggtgggaaaaacctcagctcaccagcaacaaaagaggttatcttaccatagcacttaattttcactggctcccaagtggtcacagatggcatctaggaaaagaccaaagcattctatgcaaaaagaaggtggggaagaaagtgttccgcaatttacatttttaaacactggttctattattggacgagatgatatgtaaatgtgatcccccccccccgcttacaactctacacatctgtgaccacttttaataatatcaagtttgcatagtcatggaacacaaatcaaacaagtactgtagtattacagtgacaggaatcttaaaataccatctggtgctgaatatatgatgtactgaaatactggaattatggctttttgaaatgcagtttttactgtaatcttaacttttatttatcaaaatagctacaggaaacatgaatagcaggaaaacactgaatttgtttggatgttctaagaaatggtgctaagaaaatggtgtctttaatagctaaaaatttaatgcctttatatcatcaagatgctatcagtgtactccagtgcccttgaataataggggtaccttttcattcaagtttttatcataattacctattcttacacaagcttagtttttaaaatgtggacattttaaaggcctctggattttgctcatccagtgaagtccttgtaggacaataaacgtatatatgtacatatatacacaaacatgtatatgtgcacacacatgtatatgtataaatattttaaatggtgttttagaagcactttgtctacctaagctttgacaacttgaacaatgctaaggtactgagatgtttaaaaaacaagtttactttcattttagaatgcaaagttgatttttttaaggaaacaaagaaagcttttaaaatatttttgcttttagccatgcatctgctgatgagcaattgtgtccatttttaacacagccagttaaatccaccatggggcttactggattcaagggaatacgttagtccacaaaacatgttttctggtgctcatctcacatgctatactgtaaaacagttttatacaaaattgtatgacaagttcattgctcaaaaatgtacagttttaagaattttctattaactgcaggtaataattagctgcatgctgcagactcaacaaagctagttcactgaagcctatgctattttatggatcataggctcttcagagaactgaatggcagtctgcctttgtgttgataattatgtacattgtgacgttgtcatttcttagcttaagtgtcctctttaacaagaggattgagcagactgatgcctgcataagatgaataaacagggttagttccatgtgaatctgtcagttaaaaagaaacaaaaacaggcagctggtttgctgtggtggttttaaatcattaatttgtataaagaagtgaaagagttgtatagtaaattaaattgtaaacaaaacttttttaatgcaatgctttagtattttagtactgtaaaaaaattaaatatatacatatatatatatatatatatatatatatatatgagtttgaagcagaattcacatcatgatggtgctactcagcctgctacaaatatatcataatgtgagctaagaattcattaaatgtttgagtgatgttcctacttgtcatatacctcaacactagtttggcaataggatattgaactgagagtgaaagcattgtgtaccatcatttttttccaagtccttttttttattgttaaaaaaaaaagcataccttttttcaatacttgatttcttagcaagtataacttgaacttcaacctttttgttctaaaaattcagggatatttcagctcatgctctccctatgccaacatgtcacctgtgtttatgtaaaattgttgtaggttaataaatatattctttgtcagggatttaacccttttattttgaatcccttctattttacttgtacatgtgctgatgtaactaaaactaattttgtaaatctgttggctctttttattgtaaagaaaagcattttaaaagtttgaggaatcttttgactgtttcaagcaggaaaaaaaaattacatgaaaatagaatgcactgagttgataaagggaaaaattgtaaggcaggagtttggcaagtggctgttggccagagacttacttgtaactctctaaatgaagtttttttgatcctgtaatcactgaaggtacatactccatgtggacttcccttaaacaggcaaacacctacaggtatggtgtgcaacagattgtacaattacattttggcctaaatacatttttgcttactagtatttaaaataaattcttaatcagaggaggcctttgggttttattggtcaaatctttgtaagctggcttttgtctttttaaaaaatttcttgaatttgtggttgtgtccaatttgcaaacatttccaaaaatgtttgctttgcttacaaaccacatgattttaatgttttttgtataccataatatctagccccaaacatttgattactacatgtgcattggtgattttgatcatccattcttaatatttgatttctgtgtcacctactgtcatttgttaaactgctggccaacaagaacaggaagtatagtttggggggttggggagagtttacataaggaagagaagaaattgagtggcatattgtaaatatcagatctataattgtaaatataaaacctgcctcagttagaatgaatggaaagcagatctacaatttgctaatataggaatatcaggttgactatatagccatacttgaaaatgcttctgagtggtgtcaactttacttgaatgaatttttcatcttgattgacgcacagtgatgtacagttcacttctgaagctagtggttaacttgtgtaggaaacttttgcagtttgacactaagataacttctgtgtgcatttttctatgcttttttaaaaactagtttcatttcattttcatgagatgtttggtttataagatctgaggatggttataaatactgtaagtattgtaatgttatgaatgcaggttatttgaaagctgtttattattatatcattcctgataatgctatgtgagtgtttttaataaaatttatatttatttaatgcactctaaaaaaaaaaaaaaaaaa

SEQ ID NO: 68 - protein, 2002 aa, Homo sapiens
MEQDRTNHVEGNRLSPFLIPSPPICQTEPLATKLQNGSPLPERAHPEVNGDTKWHSFKSYYGIPCMKGSQNSRVSPDFTQESRGYSKCLQNGGIKRTVSEPSLSGLLQIKKLKQDQKANGERRNFGVSQERNPGESSQPNVSDLSDKKESVSSVAQENAVKDFTSFSTHNCSGPENPELQILNEQEGKSANYHDKNIVLLKNKAVLMPNGATVSASSVEHTHGELLEKTLSQYYPDCVSIAVQKTTSHINAINSQATNELSCEITHPSHTSGQINSAQTSNSELPPKPAAVVSEACDADDADNASKLAAMLNTCSFQKPEQLQQQKSVFEICPSPAENNIQGTTKLASGEEFCSGSSSNLQAPGGSSERYLKQNEMNGAYFKQSSVFTKDSFSATTTPPPPSQLLLSPPPPLPQVPQLPSEGKSTLNGGVLEEHHHYPNQSNTTLLREVKIEGKPEAPPSQSPNPSTHVCSPSPMLSERPQNNCVNRNDIQTAGTMTVPLCSEKTRPMSEHLKHNPPIFGSSGELQDNCQQLMRNKEQEILKGRDKEQTRDLVPPTQHYLKPGWIELKAPRFHQAESHLKRNEASLPSILQYQPNLSNQMTSKQYTGNSNMPGGLPRQAYTQKTTQLEHKSQMYQVEMNQGQSQGTVDQHLQFQKPSHQVHFSKTDHLPKAHVQSLCGTRFHFQQRADSQTEKLMSPVLKQHLNQQASETEPFSNSHLLQHKPHKQAAQTQPSQSSHLPQNQQQQQKLQIKNKEEILQTFPHPQSNNDQQREGSFFGQTKVEECFHGENQYSKSSEFETHNVQMGLEEVQNINRRNSPYSQTMKSSACKIQVSCSNNTHLVSENKEQTTHPELFAGNKTQNLHHMQYFPNNVIPKQDLLHRCFQEQEQKSQQASVLQGYKNRNQDMSGQQAAQLAQQRYLIHNHANVFPVPDQGGSHTQTPPQKDTQKHAALRWHLLQKQEQQQTQQPQTESCHSQMHRPIKVEPGCKPHACMHTAPPENKTWKKVTKQENPPASCDNVQQKSIIETMEQHLKQFHAKSLFDHKALTLKSQKQVKVEMSGPVTVLTRQTTAAELDSHTPALEQQTTSSEKTPTKRTAASVLNNFIESPSKLLDTPIKNLLDTPVKTQYDFPSCRCVEQIIEKDEGPFYTHLGAGPNVAAIREIMEERFGQKGKAIRIERVIYTGKEGKSSQGCPIAKWVVRRSSSEEKLLCLVRERAGHTCEAAVIVILILVWEGIPLSLADKLYSELTETLRKYGTLTNRRCALNEERTCACQGLDPETCGASFSFGCSWSMYYNGCKFARSKIPRKFKLLGDDPKEEEKLESHLQNLSTLMAPTYKKLAPDAYNNQIEYEHRAPECRLGLKEGRPFSGVTACLDFCAHAHRDLHNMQNGSTLVCTLTREDNREFGGKPEDEQLHVLPLYKVSDVDEFGSVEAQEEKKRSGAIQVLSSFRRKVRMLAEPVKTCRQRKLEAKKAAAEKLSSLENSSNKNEKEKSAPSRTKQTENASQAKQLAELLRLSGPVMQQSQQPQPLQKQPPQPQQQQRPQQQQPHHPQTESVNSYSASGSTNPYMRRPNPVSPYPNSSHTSDIYGSTSPMNFYSTSSQAAGSYLNSSNPMNPYPGLLNQNTQYPSYQCNGNLSVDNCSPYLGSYSPQSQPMDLYRYPSQDPLSKLSLPPIHTLYQPRFGNSQSFTSKYLGYGNQNMQGDGFSSCTIRPNVHHVGKLPPYPTHEMDGHFMGATSRLPPNLSNPNMDYKNGEHHSPSHIIHNYSAAPGMFNSSLHALHLQNKENDMLSHTANGLSKMLPALNHDRTACVQGGLHKLSDANGQEKQPLALVQGVASGAEDNDEVWSDSEQSFLDPDIGGVAVAPTHGSILIECAKRELHATTPLKNPNRNHPTRISLVFYQHKSMNEPKHGLALWEAKMAEKAREKEEECEKYGPDYVPQKSHGKKVKREPAEPHETSEPTYLRFIKSLAERTMSVTTDSTVTTSPYAFTRVTGPYNRYI

SEQ ID NO: 69 - DNA, 9236 bp, Homo sapiens
aaacagaaggtgggccggggcggggagaaacagaactcggtcaatttcccagtttgtcgggtctttaaaaatacaggcccctaaagcactaagggcatgccctcggtgaaacaggggagcgcttctgctgaatgagattaaagcgacagaaaagggaaaggagagcgcgggcaacgggatctaaagggagatagagacgcgggcctctgagggctggcaaacattcagcagcacaccctctcaagattgtttacttgcctttgctcctgttgagttacaacgcttggaagcaggagatgggctcagcagcagccaataggacatgatccaggaagagcagtaagggactgagctgctgaattcaactagagggcagccttgtggatggccccgaagcaagcctgatggaacaggatagaaccaaccatgttgagggcaacagactaagtccattcctgataccatcacctcccatttgccagacagaacctctggctacaaagctccagaatggaagcccactgcctgagagagctcatccagaagtaaatggagacaccaagtggcactctttcaaaagttattatggaataccctgtatgaagggaagccagaatagtcgtgtgagtcctgactttacacaagaaagtagagggtattccaagtgtttgcaaaatggaggaataaaacgcacagttagtgaaccttctctctctgggctccttcagatcaagaaattgaaacaagaccaaaaggctaatggagaaagacgtaacttcggggtaagccaagaaagaaatccaggtgaaagcagtcaaccaaatgtctccgatttgagtgataagaaagaatctgtgagttctgtagcccaagaaaatgcagttaaagatttcaccagtttttcaacacataactgcagtgggcctgaaaatccagagcttcagattctgaatgagcaggaggggaaaagtgctaattaccatgacaagaacattgtattacttaaaaacaaggcagtgctaatgcctaatggtgctacagtttctgcctcttccgtggaacacacacatggtgaactcctggaaaaaacactgtctcaatattatccagattgtgtttccattgcggtgcagaaaaccacatctcacataaatgccattaacagtcaggctactaatgagttgtcctgtgagatcactcacccatcgcatacctcagggcagatcaattccgcacagacctctaactctgagctgcctccaaagccagctgcagtggtgagtgaggcctgtgatgctgatgatgctgataatgccagtaaactagctgcaatgctaaatacctgttcctttcagaaaccagaacaactacaacaacaaaaatcagtttttgagatatgcccatctcctgcagaaaataacatccagggaaccacaaagctagcgtctggtgaagaattctgttcaggttccagcagcaatttgcaagctcctggtggcagctctgaacggtatttaaaacaaaatgaaatgaatggtgcttacttcaagcaaagctcagtgttcactaaggattccttttctgccactaccacaccaccaccaccatcacaattgcttctttctccccctcctcctcttccacaggttcctcagcttccttcagaaggaaaaagcactctgaatggtggagttttagaagaacaccaccactaccccaaccaaagtaacacaacacttttaagggaagtgaaaatagagggtaaacctgaggcaccaccttcccagagtcctaatccatctacacatgtatgcagcccttctccgatgctttctgaaaggcctcagaataattgtgtgaacaggaatgacatacagactgcagggacaatgactgttccattgtgttctgagaaaacaagaccaatgtcagaacacctcaagcataacccaccaatttttggtagcagtggagagctacaggacaactgccagcagttgatgagaaacaaagagcaagagattctgaagggtcgagacaaggagcaaacacgagatcttgtgcccccaacacagcactatctgaaaccaggatggattgaattgaaggcccctcgttttcaccaagcggaatcccatctaaaacgtaatgaggcatcactgccatcaattcttcagtatcaacccaatctctccaatcaaatgacctccaaacaatacactggaaattccaacatgcctggggggctcccaaggcaagcttacacccagaaaacaacacagctggagcacaagtcacaaatgtaccaagttgaaatgaatcaagggcagtcccaaggtacagtggaccaacatctccagttccaaaaaccctcacaccaggtgcacttctccaaaacagaccatttaccaaaagctcatgtgcagtcactgtgtggcactagatttcattttcaacaaagagcagattcccaaactgaaaaacttatgtccccagtgttgaaacagcacttgaatcaacaggcttcagagactgagccattttcaaactcacaccttttgcaacataagcctcataaacaggcagcacaaacacaaccatcccagagttcacatctccctcaaaaccagcaacagcagcaaaaattacaaataaagaataaagaggaaatactccagacttttcctcacccccaaagcaacaatgatcagcaaagagaaggatcattctttggccagactaaagtggaagaatgttttcatggtgaaaatcagtattcaaaatcaagcgagttcgagactcataatgtccaaatgggactggaggaagtacagaatataaatcgtagaaattccccttatagtcagaccatgaaatcaagtgcatgcaaaatacaggtttcttgttcaaacaatacacacctagtttcagagaataaagaacagactacacatcctgaactttttgcaggaaacaagacccaaaacttgcatcacatgcaatattttccaaataatgtgatcccaaagcaagatcttcttcacaggtgctttcaagaacaggagcagaagtcacaacaagcttcagttctacagggatataaaaatagaaaccaagatatgtctggtcaacaagctgcgcaacttgctcagcaaaggtacttgatacataaccatgcaaatgtttttcctgtgcctgaccagggaggaagtcacactcagacccctccccagaaggacactcaaaagcatgctgctctaaggtggcatctcttacagaagcaagaacagcagcaaacacagcaaccccaaactgagtcttgccatagtcagatgcacaggccaattaaggtggaacctggatgcaagccacatgcctgtatgcacacagcaccaccagaaaacaaaacatggaaaaaggtaactaagcaagagaatccacctgcaagctgtgataatgtgcagcaaaagagcatcattgagaccatggagcagcatctgaagcagtttcacgccaagtcgttatttgaccataaggctcttactctcaaatcacagaagcaagtaaaagttgaaatgtcagggccagtcacagttttgactagacaaaccactgctgcagaacttgatagccacaccccagctttagagcagcaaacaacttcttcagaaaagacaccaaccaaaagaacagctgcttctgttctcaataattttatagagtcaccttccaaattactagatactcctataaaaaatttattggatacacctgtcaagactcaatatgatttcccatcttgcagatgtgtaggtaagtgccagaaatgtactgagacacatggcgtttatccagaattagcaaatttatcttcagatatgggattttccttctttttttaaatcttgagtctggcagcaatttgtaaaggctcataaaaatctgaagcttacattttttgtcaagttaccgatgcttgtgtcttgtgaaagagaacttcacttacatgcagtttttccaaaagaattaaataatcgtgcatgtttatttttccctctcttcagatcctgtaaaatttgaatgtatctgttttagatcaattcgcctatttagctctttgtatattatctcctggagagacagctaggcagcaaaaaaacaatctattaaaatgagaaaataacgaccataggcagtctaatgtacgaactttaaatattttttaattcaaggtaaaatatattagtttcacaagatttctggctaatagggaaattattatcttcagtcttcatgagttgggggaaatgataatgctgacactcttagtgctcctaaagtttccttttctccatttatacatttggaatgttgtgatttatattcattttgattcccttttctctaaaatttcatctttttgattaaaaaatatgatacaggcatacctcagagatattgtgggtttggctccataccacaataaaatgaatattacaataaagcaagttgtaaggactttttggtttctcactgtatgtaaaagttatttatatactatactgtaacatactaagtgtgcaatagcattgtgtctaaaaaatatatactttaaaaataatttattgttaaaaaaatgccaacaattatctgggcctttagtgagtgctaatctttttgctggtggagggtcgtgcttcagtattgatcgctgtggactgatcatggtggtagttgctgaaggttgctgggatggctgtgtgtgtggcaatttcttaaaataagacaacagtgaagtgctgtatcaattgatttttccattcacaaaagatttctctgtagcatgcaatgctgtttgatagcatttaacccacagcagaatttctttgaaaattggactcagtcctctcaaactgtgctgctgctttatcaactaagtttttgtaattttctgaatcctttgttgtcatttcagcagtttacagcatcttcattggaagtatattccatctcaaacattctttgttcatccataagaagcaacttcttatcaagttttttcatgacattgcagtaactcagccccatcttcaggctctacttctaattctggttctcttgctacatctccctcatctgcagtgacctctccacggaagtcttgaactcctcaaagtaatccatgagggttggaatcaacttctaaactcctgttaatgttgatatattgaccccctcccatgaattatgaatgttcttaataacttctaaatggtgatacctttccagaaggctttcaatgtactttgcccggatccatcagaagactatcttggcagctgtagactaacaatatatttcttaaatgataagacttgaaagtcaaaagtactccttaatccataggctgcagaatcaatgttgtattaacaggcacgaaaacagcattaatcttgtgcatctccatcggagctcttgggtgactaggtgccttgagcagtaatattttgaaaggaggttttggttttgttttttgttttttttttttgttttttagcagtaagtctcaacactgggcttaaaatattcagtaaactatgttgtaaaaagatgtgttatcatccagactttgttgttccattactctacacaagcagggtacacttagcataattcttaagggccttggaattttcagaatggtaaatgagtatgggcttcaacttaaaatcatcaactgcattagcctgtaacaagagagtcagcctgtcctttgaagcaaggcattgacttctatctatgaaagtcttagatggcaccttgtttcaatagtaggctgtttagtacagccaccttcatcagtgatcttagctagatcttctgcataacttgctgcagcttctacatcagcacttgctgcctcaccttgtccttttatgttatagagacagctgcgcttcttaaactttataaaccaacttctgctagcttccaacttctcttctgcagcttcctcattctcttcatagaactgaagggagtcaaggccttgctctggattaagctttggcttaaggaatgttgtggctgacgtgatcttctatccagaccactaaagcgctctccatatcagcaataaggccgttttgctttcttacctttcatgtgttcactggagtaatttccttcaagaatttttcctttacattcacaacttggctaactggcatgcaaggcctagctttcagcctgtcttggcttttgacatgccttcctcacttagctcgtcatatctagcttttgatttaaagtggcaggcatacaactcttcctttcacttgaacacttagaggccactgtagggttattaattggcctaatttcaatattgttgtgttttagggaatagagaggcccagggagagggagagagcccaaacggctggttgatagagcaggcagaatgcacacaacatttatcagattatgtttgcaccatttaccagattatgggtacggtttgtggcaccccccaaaaattagaatagtaacatcaaagatcactgatcacagatcgccataacataaataataataaactttaaaatactgtgagaattaccaaaatgtgatacagagacatgaagtgagcacatgctgttgaaaaaaatgacactgatagacatacttaacacgtgggattgccacaaaccttcagtttgtaaaagtcacagtaactgtgactcacaaaagaacaaagcacaataaaacgaggtatgcctgtatttttaaaaaaagctttttgttaaaattcaggatatgtaataggtctgtaggaatagtgaaatatttttgctgatggatgtagatatatacgtggatagagatgaagatcttaattatagctatgcagcatagatttagtcaaagacatttgaaaagacaaatgttaaattagtgtggctaatgacctacccgtgccatgttttccctcttgcaatgagataccccacactgtgtagaaggatggagggaggactcctactgtccctctttgcgtgtggttattaagttgcctcactgggctaaaacaccacacatctcatagataatatttggtaagttgtaatcgtcttcactcttctcttatcacccacccctatcttcccacttttccatctttgttggtttgcaacagccccttctttttgcctgactctccaggattttctctcatcataaattgttctaaagtacatactaatatgggtctggattgactattcttatttgcaaaacagcaattaaatgttatagggaagtaggaagaaaaaggggtatccttgacaataaaccaagcaatattctgggggtgggatagagcaggaaattttatttttaatcttttaaaatccaagtaataggtaggcttccagttagctttaaatgttttttttttccagctcaaaaaattggattgtagttgatactacatataatacattctaattccctcactgtattctttgtttagtttcatttatttggtttaaaataattttttatcccatatctgaaatgtaatatatttttatccaacaaccagcatgtacatatacttaattatgtggcacattttctaatagatcagtccatcaatctactcattttaaagaaaaaaaaattttaaagtcacttttagagcccttaatgtgtagttgggggttaagctttgtggatgtagcctttatatttagtataattgaggtctaaaataataatcttctattatctcaacagagcaaattattgaaaaagatgaaggtcctttttatacccatctaggagcaggtcctaatgtggcagctattagagaaatcatggaagaaaggtaattaacgcaaaggcacagggcagattaacgtttatccttttgtatatgtcagaatttttccagccttcacacacaaagcagtaaacaattgtaaattgagtaattattagtaggcttagctattctagggttgccaacactacacactgtgctattcaccagagagtcacaatatttgacaggactaatagtctgctagctggcacaggctgcccactttgcgatggatgccagaaaacccaggcatgaacaggaatcggccagccaggctgccagccacaaggtactggcacaggctccaacgagaggtcccactctggctttcccacctgataataaagtgtcaaagcagaaagactggtaaagtgtggtataagaaaagaaccactgaattaaattcacctagtgttgcaaatgagtacttatctctaagttttcttttaccataaaaagagagcaagtgtgatatgttgaatagaaagagaaacatactatttacagctgcctttttttttttttttcgctatcaatcacaggtatacaagtacttgcctttactcctgcatgtagaagactcttatgagcgagataatgcagagaaggcctttcatataaatttatacagctctgagctgttcttcttctagggtgccttttcattaagaggtaggcagtattattattaaagtacttaggatacattggggcagctaggacatattcagtatcattcttgctccatttccaaattattcatttctaaattagcatgtagaagttcactaaataatcatctagtggcctggcagaaatagtgaatttccctaagtgccttttttttgttgtttttttgttttgttttttaaacaagcagtaggtggtgctttggtcataagggaagatatagtctatttctaggactattccatattttccatgtggctggatactaactatttgccagcctccttttctaaattgtgagacattcttggaggaacagttctaactaaaatctattatgactccccaagttttaaaatagctaaatttagtaagggaaaaaatagtttatgttttagaagactgaacttagcaaactaacctgaattttgtgctttgtgaaattttatatcgaaatgagctttcccattttcacccacatgtaatttacaaaatagttcattacaattatctgtacattttgatattgaggaaaaacaaggcttaaaaaccattatccagtttgcttggcgtagacctgtttaaaaaataataaaccgttcatttctcaggatgtggtcatagaataaagttatgctcaaatgttcaaatatttaaa

SEQ ID NO: 70 - protein, 1165 aa, Homo sapiens
MEQDRTNHVEGNRLSPFLIPSPPICQTEPLATKLQNGSPLPERAHPEVNGDTKWHSFKSYYGIPCMKGSQNSRVSPDFTQESRGYSKCLQNGGIKRTVSEPSLSGLLQIKKLKQDQKANGERRNFGVSQERNPGESSQPNVSDLSDKKESVSSVAQENAVKDFTSFSTHNCSGPENPELQILNEQEGKSANYHDKNIVLLKNKAVLMPNGATVSASSVEHTHGELLEKTLSQYYPDCVSIAVQKTTSHINAINSQATNELSCEITHPSHTSGQINSAQTSNSELPPKPAAVVSEACDADDADNASKLAAMLNTCSFQKPEQLQQQKSVFEICPSPAENNIQGTTKLASGEEFCSGSSSNLQAPGGSSERYLKQNEMNGAYFKQSSVFTKDSFSATTTPPPPSQLLLSPPPPLPQVPQLPSEGKSTLNGGVLEEHHHYPNQSNTTLLREVKIEGKPEAPPSQSPNPSTHVCSPSPMLSERPQNNCVNRNDIQTAGTMTVPLCSEKTRPMSEHLKHNPPIFGSSGELQDNCQQLMRNKEQEILKGRDKEQTRDLVPPTQHYLKPGWIELKAPRFHQAESHLKRNEASLPSILQYQPNLSNQMTSKQYTGNSNMPGGLPRQAYTQKTTQLEHKSQMYQVEMNQGQSQGTVDQHLQFQKPSHQVHFSKTDHLPKAHVQSLCGTRFHFQQRADSQTEKLMSPVLKQHLNQQASETEPFSNSHLLQHKPHKQAAQTQPSQSSHLPQNQQQQQKLQIKNKEEILQTFPHPQSNNDQQREGSFFGQTKVEECFHGENQYSKSSEFETHNVQMGLEEVQNINRRNSPYSQTMKSSACKIQVSCSNNTHLVSENKEQTTHPELFAGNKTQNLHHMQYFPNNVIPKQDLLHRCFQEQEQKSQQASVLQGYKNRNQDMSGQQAAQLAQQRYLIHNHANVFPVPDQGGSHTQTPPQKDTQKHAALRWHLLQKQEQQQTQQPQTESCHSQMHRPIKVEPGCKPHACMHTAPPENKTWKKVTKQENPPASCDNVQQKSIIETMEQHLKQFHAKSLFDHKALTLKSQKQVKVEMSGPVTVLTRQTTAAELDSHTPALEQQTTSSEKTPTKRTAASVLNNFIESPSKLLDTPIKNLLDTPVKTQYDFPSCRCVGKCQKCTETHGVYPELANLSSDMGFSFFF

SEQ ID NO: 71 - DNA, 25 bp, Artificial Sequence
  Description of Artificial Sequence: Synthetic primer
tgacagtgatgagaatgacctgttc

SEQ ID NO: 72 - DNA, 20 bp, Artificial Sequence
  Description of Artificial Sequence: Synthetic primer
ttggaagcagcccttcatct

SEQ ID NO: 73 - DNA, 25 bp, Artificial Sequence
  Description of Artificial Sequence: Synthetic primer
gctaccaaactggatataatcagga

SEQ ID NO: 74 - DNA, 24 bp, Artificial Sequence
  Description of Artificial Sequence: Synthetic primer
ccaggtagctatggtactccagaa

SEQ ID NO: 75 - DNA, 15 bp, Artificial Sequence
  Description of Artificial Sequence: Synthetic primer
cggagtccgggcagg

SEQ ID NO: 76 - DNA, 21 bp, Artificial Sequence
  Description of Artificial Sequence: Synthetic primer
gctgggtagagaatggatgaa

SEQ ID NO: 77 - DNA, 20 bp, Artificial Sequence
  Description of Artificial Sequence: Synthetic primer
cagccagatgcagttaacgc

SEQ ID NO: 78 - DNA, 23 bp, Artificial Sequence
  Description of Artificial Sequence: Synthetic primer
gcctactcattgggatcatcttg

SEQ ID NO: 79 - DNA, 20 bp, Artificial Sequence
  Description of Artificial Sequence: Synthetic primer
cagcagcaagtgctccaatc

SEQ ID NO: 80 - DNA, 20 bp, Artificial Sequence
  Description of Artificial Sequence: Synthetic primer
cacacacttggcggttcctt

SEQ ID NO: 81 - DNA, 23 bp, Artificial Sequence
  Description of Artificial Sequence: Synthetic primer
catctggttcagtgctttgatct

SEQ ID NO: 82 - DNA, 22 bp, Artificial Sequence
  Description of Artificial Sequence: Synthetic primer
acccgtgagttattccatgagt

SEQ ID NO: 83 - DNA, 20 bp, Artificial Sequence
  Description of Artificial Sequence: Synthetic primer
acatccctgagagctcttgc

SEQ ID NO: 84 - DNA, 20 bp, Artificial Sequence
  Description of Artificial Sequence: Synthetic primer
agagcctcaagcaaccaaaa

SEQ ID NO: 85 - DNA, 19 bp, Artificial Sequence
  Description of Artificial Sequence: Synthetic primer
gctccaagcagatgcagca

SEQ ID NO: 86 - DNA, 18 bp, Artificial Sequence
  Description of Artificial Sequence: Synthetic primer
ccggatgtgaggcagcag

SEQ ID NO: 87 - DNA, 22 bp, Artificial Sequence
  Description of Artificial Sequence: Synthetic primer
aatcaagaacgaaagtcggagg

SEQ ID NO: 88 - DNA, 19 bp, Artificial Sequence
  Description of Artificial Sequence: Synthetic primer
gcgggtcatgggaataacg

SEQ ID NO: 89 - DNA, 22 bp, Artificial Sequence
  Description of Artificial Sequence: Synthetic primer
caaaccttccaaatcacttcct

SEQ ID NO: 90 - DNA, 22 bp, Artificial Sequence
  Description of Artificial Sequence: Synthetic primer
ccgaagtcatagccacactcaa

SEQ ID NO: 91 - DNA, 24 bp, Artificial Sequence
  Description of Artificial Sequence: Synthetic primer
tgacttcaagaacatccagagctt

SEQ ID NO: 92 - DNA, 22 bp, Artificial Sequence
  Description of Artificial Sequence: Synthetic primer
ggactacatggcggtggaatac

SEQ ID NO: 93 - DNA, 23 bp, Artificial Sequence
  Description of Artificial Sequence: Synthetic primer
aacacgtacttgtacctgaaagc

SEQ ID NO: 94 - DNA, 20 bp, Artificial Sequence
  Description of Artificial Sequence: Synthetic primer
tccttcccactcaactttgc

SEQ ID NO: 95 - DNA, 20 bp, Artificial Sequence
  Description of Artificial Sequence: Synthetic primer
gctcagtcatcagcaactcg

SEQ ID NO: 96 - DNA, 20 bp, Artificial Sequence
  Description of Artificial Sequence: Synthetic primer
tccttgaagttgacgcaaga

SEQ ID NO: 97 - DNA, 20 bp, Artificial Sequence
  Description of Artificial Sequence: Synthetic primer
caagggagcttcagggtcaa

SEQ ID NO: 98 - DNA, 26 bp, Artificial Sequence
  Description of Artificial Sequence: Synthetic primer
cttgagagtggctatgacttctgtct

SEQ ID NO: 99 - DNA, 22 bp, Artificial Sequence
  Description of Artificial Sequence: Synthetic primer
gagagcaggtcaaggtgaacag

SEQ ID NO: 100 - DNA, 23 bp, Artificial Sequence
  Description of Artificial Sequence: Synthetic primer
gatgattatggctactgctgtca

SEQ ID NO: 101 - DNA, 20 bp, Artificial Sequence
  Description of Artificial Sequence: Synthetic primer
aagcgagacctggggtatct

SEQ ID NO: 102 - DNA, 20 bp, Artificial Sequence
  Description of Artificial Sequence: Synthetic primer
atcacaggcgaagtccaatc

SEQ ID NO: 103 - DNA, 20 bp, Artificial Sequence
  Description of Artificial Sequence: Synthetic oligonucleotide
gtgggcatggtgcggcacca

SEQ ID NO: 104 - DNA, 20 bp, Artificial Sequence
  Description of Artificial Sequence: Synthetic oligonucleotide
gaacaagctctacatcccgt

SEQ ID NO: 105 - DNA, 23 bp, Artificial Sequence
  Description of Artificial Sequence: Synthetic oligonucleotide
gtgggcatggtgcggcaccaggg

SEQ ID NO: 106 - DNA, 17 bp, Artificial Sequence
  Description of Artificial Sequence: Synthetic oligonucleotide
ggtgcggcaaccaggga

SEQ ID NO: 107 - DNA, 14 bp, Artificial Sequence
  Description of Artificial Sequence: Synthetic oligonucleotide
ggtgcgcaccagga

SEQ ID NO: 108 - DNA, 18 bp, Artificial Sequence
  Description of Artificial Sequence: Synthetic oligonucleotide
ggtgcggcattccaggga

SEQ ID NO: 109 - DNA, 45 bp, Mus musculus
ggcttgtgagcgggaacaagctctacatcccgtaggaagtaagac

SEQ ID NO: 110 - DNA, 44 bp, Artificial Sequence
  Description of Artificial Sequence: Synthetic oligonucleotide
ggcttgtgagcgggaacaagctctacatccgtaggaagtaagac

SEQ ID NO: 111 - DNA, 43 bp, Artificial Sequence
  Description of Artificial Sequence: Synthetic oligonucleotide
ggcttgtgagcgggaacaagctctacatcgtaggaagtaagac

SEQ ID NO: 112 - DNA, 43 bp, Artificial Sequence
  Description of Artificial Sequence: Synthetic oligonucleotide
ggcttgtgagcgggaacaagctctacctcgtaggaagtaagac

SEQ ID NO: 113 - DNA, 12 bp, Artificial Sequence
  Description of Artificial Sequence: Synthetic oligonucleotide
ggcttgtaagac

SEQ ID NO: 114 - DNA, 16 bp, Mus musculus
ggtgcggcaccaggga

SEQ ID NO: 115 - DNA, 23 bp, Artificial Sequence
  Description of Artificial Sequence: Synthetic oligonucleotide
gaacaagctctacatcccgtagg
